(19) United States
(12) Patent Application Publication
(10) Pub. No.: US 2024/0318165 A1
(43) Pub. Date: Sep. 26, 2024

(54) TYPE I-B CRISPR-ASSOCIATED TRANSPOSASE SYSTEMS

(71) Applicants: THE BROAD INSTITUTE, INC., Cambridge, MA (US); MASSACHUSETTS INSTITUTE OF TECHNOLOGY, Cambridge, MA (US)

(72) Inventors: Feng Zhang, Cambridge, MA (US); Makoto Saito, Cambridge, MA (US)

(21) Appl. No.: 18/269,813

(22) PCT Filed: Dec. 30, 2021
(86) PCT No.: PCT/US2021/065783

§ 371 Date: Jun. 27, 2023

Related U.S. Application Data
(60) Provisional application No. 63/132,144, filed on Dec. 30, 2020.

(51) Int. Cl. C12N 15/10; C12N 9/22; C12N 15/11; C12N 15/85; C12N 15/90

(52) U.S. Cl. CPC C12N 15/102; C12N 9/22; C12N 15/111; C12N 15/85; C12N 15/90; C12N 2310/20

(57) ABSTRACT

Systems and methods for targeted gene modification, targeted insertion, perturbation of gene transcripts, and nucleic acid editing. Novel nucleic acid targeting systems comprise components of CRISPR systems and transposable elements.

### CROSS-REFERENCE TO RELATED APPLICATIONS

[0001] This application claims priority to and the benefit of U.S. Provisional Application No. 63/132,144, filed Dec. 30, 2020. The entire contents of the above-identified application is hereby fully incorporated herein by reference.

### STATEMENT REGARDING FEDERALLY SPONSORED RESEARCH

[0002] This invention was made with government support under Grant No. HL141201 awarded by the National Institutes of Health. The government has certain rights in the invention.

### REFERENCE TO AN ELECTRONIC SEQUENCE LISTING

[0003] The contents of the electronic sequence listing (“BROD-5350WP_ST25.txt”; Size is 1,443,468 bytes and it was created on Dec. 30, 2021) is herein incorporated by reference in its entirety.

### TECHNICAL FIELD

[0004] The subject matter disclosed herein is generally directed to systems, methods and compositions used for targeted gene modification, targeted insertion, perturbation of gene transcripts, and nucleic acid editing. Novel nucleic acid targeting systems comprise components of Clustered Regularly Interspaced Short Palindromic Repeats (CRISPR) systems and transposable elements.

### BACKGROUND

[0005] Recent advances in genome sequencing techniques and analysis methods have significantly accelerated the ability to catalog and map genetic factors associated with a diverse range of biological functions and diseases. Precise genome targeting technologies are needed to enable systematic reverse engineering of causal genetic variations by allowing selective perturbation of individual genetic elements, as well as to advance synthetic biology, biotechnological, and medical applications. Although genome-editing techniques such as designer zinc fingers, transcription activator-like effectors (TALEs), or homing meganucleases are available for producing targeted genome perturbations, there remains a need for new genome engineering technologies that employ novel strategies and molecular mechanisms and are affordable, easy to set up, scalable, and amenable to targeting multiple positions within the eukaryotic genome. This would provide a major resource for new applications in genome engineering and biotechnology.

[0006] The CRISPR-Cas systems of bacterial and archaeal adaptive immunity show extreme diversity of protein composition, genomic loci architecture, and system function. Systems comprising CRISPR-like components are widespread and continue to be discovered. Novel multi-subunit effector complexes and single-subunit effector modules may be developed as powerful genome engineering tools.

[0007] Citation or identification of any document in this application is not an admission that such document is available as prior art to the present invention.

### SUMMARY

[0008] In one aspect, the present disclosure provides an engineered system, the system comprising: one or more CRISPR-associated Tn7 or Tn7-like transposases or functional fragments thereof, one or more Type I-B Cas proteins; and a guide molecule capable of complexing with the Type I-B Cas protein and directing binding of the guide-Cas protein complex to a target polynucleotide.

[0009] In some embodiments, the one or more CRISPR-associated Tn7 or Tn7-like transposases comprise TnsA, TnsB, TnsC, and/or TniQ. In some embodiments, the Tn7 or Tn7-like transposases comprise TnsA, TnsB, TnsC, a first TniQ and a second TniQ, wherein the first and second TniQ are different. In some embodiments, the Tn7 or Tn7-like transposases comprise comprises TnsA, TnsB, TnsC, and a TniQ. In some embodiments, the TniQ comprises a DNA-binding domain. In some embodiments, the DNA-binding domain is at C-terminus of the TniQ. In some embodiments, the one or more CRISPR-associated Tn7 or Tn7-like transposases comprise TnsA, TnsB, TnsC, and/or TnsD. In some embodiments, the Tn7 or Tn7-like transposases comprise TnsA, TnsB, TnsC, a first TnsD and a second TnsD, wherein the first and second TniD are different. In some embodiments, the Tn7 or Tn7-like transposase comprises TnsA, TnsB, TnsC and a TnsD. In some embodiments, the TnsD comprises a DNA-binding domain. In some embodiments, the TnsA and TnsB are comprised in a single protein. In some embodiments, the Tn7 or Tn7-like transposase comprises TnsA, TnsB, TnsC and TnsD1; TnsA, TnsB, TnsC and TnsD2; or TnsA, TnsB, TnsC, TnsD, and TnsD2.

[0010] In some embodiments, the one or more Type I-B Cas proteins comprises Cas5, Cas6, Cas7, and/or Cas 8. In some embodiments, the one or more Type I-B Cas proteins comprises Cas 8b. In some embodiments, the Cas8b is Cas8b3.

[0011] In some embodiments, the one or more CRISPR-associated Tn7 or Tn7-like transposases and/or the one or more Type I-B Cas proteins are from or originated from Anabaena variabilis. In some embodiments, the one or more Type I-B Cas proteins lacks nuclease activity. In some embodiments, the system further comprises a donor polynucleotide. In some embodiments, the donor polynucleotide comprises a polynucleotide insert, a left element sequence, and a right element sequence. In some embodiments, the donor polynucleotide introduces one or more mutations to the target polynucleotide, corrects a premature stop codon in the target polynucleotide, disrupts a splicing site, restores a splicing site, or a combination thereof. In some embodiments, the one or more mutations introduced by the donor polynucleotide comprises substitutions, deletions, insertions, or a combination thereof. In some embodiments, the one or more mutations causes a shift in an open reading frame on the target polynucleotide. In some embodiments, the donor polynucleotide is between 100 bases and 30 kb in length. In some embodiments, the target polynucleotide comprises a protospacer adjacent motif (PAM) on 5′ side of the target polynucleotide. In some embodiments, the PAM is AT or ATG. In some embodiments, the system further comprises a targeting moiety. In some embodiments, the system comprises a plurality of guide molecules capable of directing binding of the guide-Cas protein complex to one or more target polynucleotides.

[0012] In some embodiments, the donor polynucleotide is inserted to the target polynucleotide at a site no more than 80, no more 90, no more 100, no more 200, or no more 300 bp 3′ of the PAM. In some embodiments, donor polynucleotide is inserted to the target polynucleotide at a site no more than 80, no more 90, no more 100, no more 200, or no more 300 bp 5′ of the PAM. In some embodiments, the target polynucleotide is linear, circular, or genomic DNA. In some embodiments, the one or more Tn7 transposase is derived from a first species and the one or more Type I-B Cas proteins is derived from a second species different from the first species. In some embodiments, the system comprises a first TnsD1 derived from the first species and a second TnsD2 derived from the second species. In some embodiments, the one or more Tn7 transposase polypeptides comprises a transposase with activity of TnsA and TnsB.

[0013] In another aspect, the present disclosure provides a system comprising one or more polynucleotides encoding: one or more CRISPR-associated Tn7 or Tn7-like transposases or functional fragments thereof, one or more Type I-B Cas proteins; and a guide molecule capable of complexing with the Type I-B Cas protein and directing binding of the guide-Cas protein complex to a target polynucleotide.

[0014] In some embodiments, the system further comprises a donor polynucleotide. In some embodiments, the donor polynucleotide comprises a polynucleotide insert, a left element sequence, and a right element sequence. In some embodiments, the system comprises one or more polynucleotides or encoded products of the polynucleotides in one or more loci in Table 7. In some embodiments, the one or more polynucleotides encode components (a)-(c) of the system. In some embodiments, the one or more Type I-B Cas proteins comprises Cas5, Cas6, Cas7, and/or Cas 8. In some embodiments, the system comprises a first polynucleotide encoding a first Cas6 and a second polynucleotide encoding a second Cas6.

[0015] In another aspect, the present disclosure provides a vector comprising the one or more polynucleotides herein.

[0016] In another aspect, the present disclosure provides an engineered cell comprising the system herein, or the vector herein. In some embodiments, the cell produces and/or secretes an endogenous or non-endogenous biological product or chemical compound. In some embodiments, the biological product is a protein or an RNA.

[0017] In another aspect, the present disclosure provides a cell line comprising the engineered cell herein and progeny thereof.

[0018] In another aspect, the present disclosure provides a plant or animal model comprising the engineered cell herein and progeny thereof.

[0019] In another aspect, the present disclosure provides a composition comprising the engineered cell herein. In some embodiments, the composition is formulated for use as a therapeutic. In another aspect, the present disclosure provides a biological product or chemical compound produced by the engineered cell herein.

[0020] In another aspect, the present disclosure provides an engineered cell or progeny thereof, the cell being engineered by use of the system herein. In some embodiments, the cell or progeny thereof is isolated. In some embodiments, the cell or progeny thereof is further used as a therapeutic. In some embodiments, the cell or progeny thereof include those from which a product is isolated.

[0021] In another aspect, the present disclosure provides a product produced by the cell or progeny thereof herein. In some embodiments, the product is a protein or an RNA. In some embodiments, the protein comprises a mutation.

[0022] In another aspect, the present disclosure provides a pharmaceutical composition for treatment of a disease or disorder, comprising the cell or progeny thereof herein. In some embodiments, the treatment results in genetic changes in one or more cells. In some embodiments, the treatment results in correction of one or more defective genotypes. In some embodiments, the treatment results in improved phenotype. In some embodiments, the cell comprises a mutation in a protein expressed from a gene comprising the target sequence. In some embodiments, the cell comprises deletion of a genomic region comprising the target sequence. In some embodiments, the cell comprises integration of an exogenous sequence by homology-directed repair. In some embodiments, the cell comprises decreased transcription of a gene associated with the target sequence. In some embodiments, the cell comprises increased transcription of a gene associated with the target sequence. In some embodiments, the product is a mutated protein or product provided by a template.

[0023] In another aspect, the present disclosure provides a method of inserting a donor polynucleotide into a target polynucleotide in a cell, the method comprises introducing to the cell: one or more CRISPR-associated Tn7 or Tn7-like transposases or functional fragments thereof, one or more Type I-B Cas proteins; and a guide molecule capable of complexing with the Type I-B Cas protein and directing binding of the guide-Cas protein complex to a target polynucleotide.

[0024] In some embodiments, the donor polynucleotide introduces one or more mutations to the target polynucleotide, corrects a premature stop codon in the target polynucleotide, disrupts a splicing site, restores a splicing site, or a combination thereof.

[0025] In some embodiments, the one or more mutations introduced by the donor polynucleotide comprises substitutions, deletions, insertions, or a combination thereof. In some embodiments, the one or more mutations causes a shift in an open reading frame on the target polynucleotide. In some embodiments, the donor polynucleotide is between 100 bases and 30 kb in length. In some embodiments, one or more of components (a), (b), and (c) is expressed from a nucleic acid operably linked to a regulatory sequence. In some embodiments, one or more of components (a), (b), and (c) is introduced in a particle. In some embodiments, the particle comprises a ribonucleoprotein (RNP). In some embodiments, the cell is a prokaryotic cell. In some embodiments, the cell is a eukaryotic cell. In some embodiments, the cell is a mammalian cell, a cell of a non-human primate, or a human cell. In some embodiments, the cell is a plant cell.

[0026] In some embodiments, insertion of the donor polynucleotide into the target polynucleotide in the cell results in a cell or population of cells comprising altered expression levels of one or more gene products; a cell or population of cells that produces and/or secrete an endogenous or non-endogenous biological product or chemical compound.

[0027] In some embodiments, the donor polynucleotide is inserted to a site no more than 80, no more 90, no more 100, no more 200, or no more 300 bp 3′ of a PAM on the target polynucleotide. In some embodiments, the donor polynucleotide is inserted to a site no more than 80, no more 90, no more 100, no more 200, or no more 300 bp 5′ of a PAM on the target polynucleotide. In some embodiments, the target polynucleotide is linear, circular, or genomic DNA.

[0028] These and other aspects, objects, features, and advantages of the example embodiments will become apparent to those having ordinary skill in the art upon consideration of the following detailed description of illustrated example embodiments.

### BRIEF DESCRIPTION OF THE DRAWINGS

[0029] An understanding of the features and advantages of the present invention will be obtained by reference to the following detailed description that sets forth illustrative embodiments, in which the principles of the invention may be utilized, and the accompanying drawings of which:

[0030] FIG. 1 shows a construct of an exemplary Type I-B CAST system from locus CP000117 of Anabaena variabilis ATCC 29413.

[0031] FIG. 2 shows plasmids for expressing the exemplary CAST system in Example 1.

[0032] FIG. 3 shows the maps of the plasmids in FIG. 2.

[0033] FIGS. 4-5 show the insertion of target sequences by the exemplary CAST system with different primer pairs.

[0034] FIG. 6 shows the sequences of the amplicons (by primer pairs a and b) recovered from gel bands from the tests shown in FIGS. 4-5.

[0035] FIG. 7 shows impacts of deletion of the components on the function of the exemplary CAST system.

[0036] FIG. 8 shows the sequences of the amplicons from the experiment shown in FIG. 7.

[0037] FIG. 9 shows purification of the proteins in CP000117: TnsA, TnsB, TniQ1, and TniQ2.

[0038] FIG. 10 shows testing results for targeting 10 genomic loci of BL21DE3.

[0039] FIG. 11 shows characterization of an exemplary CAST system.

[0040] FIG. 12 shows “N” AT-PAM tiling in glmS locus.

[0041] FIG. 13 shows the in vitro homing of an exemplary CAST system.

[0042] FIG. 14 shows the homing of an exemplary CAST system in 293T cells.

[0043] FIG. 15 shows evaluation of various conditions and their effects on the function of an exemplary CAST system.

[0044] FIG. 16 shows effects of various tags on the function of an exemplary CAST system.

[0045] FIG. 17 shows the expression of components of an exemplary CAST system in 293 cells.

[0046] FIG. 18 shows the plasmids used for testing the expression of the CAST components in FIG. 17.

[0047] FIGS. 19-21 show insertion of donor polynucleotides at target sites in mammalian cells by an exemplary CAST.

[0048] FIG. 22 shows characterization of the insertions in FIGS. 19-21 by sequencing.

[0049] FIG. 23 shows different functions of exemplary TniQ proteins.

[0050] FIG. 24 shows characterization of TnsB in an exemplary CAST system.

[0051] FIG. 25 PAM screening for an exemplary CAST system.

[0052] FIG. 26 shows minimal binding sites for an exemplary TnsB.

[0053] FIG. 27 shows consensus sequences of binding sites for an exemplary TnsB.

[0054] FIG. 28 shows various cargo sizes tested for an exemplary CAST system.

[0055] FIG. 29 shows results from evaluation of the insertion site specificity.

[0056] FIG. 30 shows the results of plasmid targeting and LE junction of an exemplary CAST system.

[0057] FIGS. 31-32. FIG. 31 shows the analysis of plasmids used in screening PAM of exemplary CAST systems. FIG. 32 shows the PAM screening results.

[0058] FIG. 33 shows analysis of competitive and/or cooperative effects of TnsD1 and TnsD2 on homing and CAST functions.

[0059] FIG. 34 shows testing of subcellular localization of plasmid targeting of an exemplary CAST-I-B system.

[0060] FIG. 35 shows exemplary Type I-B CAST systems.

[0061] FIG. 36 shows locus of T24 CAST and constructs for adapting the T24 CAST system in mammalian cells.

[0062] FIG. 37 shows expression of the components of an exemplary T24 CAST system in mammalian cells.

[0063] FIG. 38 shows cellular localization of NLS-tagged components of an exemplary T24-CAST system.

[0064] FIG. 39 shows results of GFP spiked-in transfection.

[0065] FIG. 40 shows experiment schemes for analyzing Tn7/CAST plasmid targeting in 293FT cells.

[0066] FIG. 41 shows plasmid targeting of an exemplary T24-Tn7 system in 293FT cells.

[0067] FIG. 42 shows plasmid targeting of an exemplary T24-CAST system in 293FT cells.

[0068] FIG. 43 shows analysis of individual components in an exemplary T24-CAST.

[0069] FIG. 44 shows effects of ratios between proteins and guide molecules on insertion activity.

[0070] FIG. 45 shows additional exemplary Type I-B CAST systems.

[0071] FIG. 46 shows exemplary methods for analyzing Type I-B CAST systems in E coli.

[0072] FIG. 47 shows exemplary methods for analyzing Type I-B CAST systems in mammalian cells.

[0073] FIG. 48 shows three exemplary Type I-B CAST systems tested work in mammalian plasmid targeting.

[0074] FIG. 49 shows PAM screening for an exemplary Type I-B CAST system.

[0075] FIG. 50 shows mammalian PAM screening pipelines for exemplary Type I-B CAST systems.

[0076] FIG. 51 shows testing PAM libraries in 293FT cells.

[0077] FIG. 52 shows results from PAM screening for exemplary Type I-B CAST systems.

[0078] FIG. 53 shows a map of an exemplary Type I-B CAST (IB18) locus.

[0079] FIG. 54 shows a map of an exemplary Type I-B CAST (IB28) locus.

[0080] FIG. 55 shows exemplary CAST systems comprising Type IB Cas proteins.

[0081] FIG. 56 constructs expressing exemplary CAST (T24) attached with various NLS.

[0082] FIG. 57 shows subcellular localization of components of T24 attached with v1 NLS

[0083] FIG. 58 shows subcellular localization of components of T24 attached with other versions of NLS.

[0084] FIG. 59 shows plasmids with the various NLS with T24 and their targeting activities.

[0085] FIG. 60 shows an exemplary experiment for testing mammalian genome targeting with t24.

[0086] FIG. 61 shows targeting of the plasmids in a 96-well format test with QE.

[0087] FIG. 62 shows PCR experiments performed to test the plasmids' effects on target genes.

[0088] FIG. 63 shows subcellular localization of Cascade components of IB28 CAST system.

[0089] FIG. 64 shows subcellular localization of Tns components of IB28 CAST system.

[0090] FIG. 65 shows subcellular localization of components of IB28 CAST system with various versions of NLSs.

[0091] FIG. 66 shows plasmids with the various NLS with IB28, and their targeting activities.

[0092] FIG. 67 shows subcellular localization of Cascade components of v. 1 of NLS for IB18.

[0093] FIG. 68 shows subcellular localization of Tns components of v.1 of NLS for IB18.

[0094] FIG. 69 shows the locus of IB20.

[0095] FIG. 70 shows the function of IB20 in mammalian cells.

[0096] FIG. 71 shows the result from screening of PAM sequences.

[0097] FIG. 72 shows a map of IB20_pCMV-Cas5-NLS-HA and FIG. 73 shows the expression cassette.

[0098] FIG. 74 shows a map of IB20_pCMV-Cas6-NLS-HA and FIG. 75 shows the expression cassette.

[0099] FIG. 76 shows a map of IB20_pCMV-Cas7-NLS-HA and FIG. 77 shows the expression cassette.

[0100] FIG. 78 shows a map of IB20_pCMV-Cas8-NLS-HA and FIG. 79 shows the expression cassette.

[0101] FIG. 80 shows a map of IB20_pCMV-HA-NLS-Cas5 and FIG. 81 shows the expression cassette.

[0102] FIG. 82 shows a map of IB20_pCMV-HA-NLS-Cas6 and FIG. 83 shows the expression cassette.

[0103] FIG. 84 shows a map of IB20_pCMV-HA-NLS-Cas7 and FIG. 85 shows the expression cassette.

[0104] FIG. 86 shows a map of IB20_pCMV-HA-NLS-Cas8 and FIG. 87 shows the expression cassette.

[0105] FIG. 88 shows a map of IB20_pCMV-HA-NLS-TniQ1 and FIG. 89 shows the expression cassette.

[0106] FIG. 90 shows a map of IB20_pCMV-HA-NLS-TniQ2 and FIG. 91 shows the expression cassette.

[0107] FIG. 92 shows a map of IB20_pCMV-HA-NLS-TnsA and FIG. 93 shows the expression cassette.

[0108] FIG. 94 shows a map of IB20_pCMV-HA-NLS-TnsC and FIG. 95 shows the expression cassette.

[0109] FIG. 96 shows a map of IB20_pCMV-TniQ1-NLS-HA and FIG. 97 shows the expression cassette.

[0110] FIG. 98 shows a map of IB20_pCMV-TniQ2-NLS-HA and FIG. 99 shows the expression cassette.

[0111] FIG. 100 shows a map of IB20_pCMV-TnsA-NLS-HA and FIG. 101 shows the expression cassette.

[0112] FIG. 102 shows a map of IB20_pCMV-TnsC-NLS-HA and FIG. 103 shows the expression cassette.

[0113] FIG. 104 shows the map of pDonor_IB20-CmR.

[0114] FIG. 105 shows the map of pU6-IB20_CRISPR_PAMcont(−).

[0115] FIG. 106 shows the map of pU6-IB20_CRISPR_PAMlib(+).

[0116] FIG. 107 shows example type I-b CAST T24 characterization in bacteria.

[0117] FIG. 108 shows T24 CAST function in targeting plasmids in mammalian cells

[0118] FIG. 109 shows screening of PAM of T24 CAST.

[0119] FIG. 110 shows PAM screening for additional CAST orthologs.

[0120] FIG. 111 shows IB20 locus and activity.

[0121] FIG. 112 shows example type I-b CAST loci.

[0122] FIGS. 113A-113B. NLSs were fused to the components of example CAST-1b systems and the subcellular localization of the components were tested by immunofluorescence.

[0123] FIGS. 114A-114B. Copy numbers of the plasmids needed for the T24 system to be active.

[0124] FIG. 115. Targeting LINE1-ORF2 by each of the four example CAST systems with 24 guide molecules.

[0125] FIG. 116. The CAST systems were active in targeting both super coiled and linear DNA target.

[0126] FIG. 117. Different sizes of the target sequences were tested, including linear targets comprising up to 300 bp upstream (5′ of PAM) and linear targets comprising up to 348 bp downstream (3′ of PAM).

[0127] FIG. 118. The minimal fragment size for CAST-1b function in 293FT cells.

[0128] FIGS. 119-120. Nucleosome accessibility of the Cas proteins in the Type I-b CAST systems was tested by transcription activation.

[0129] FIGS. 121-122. Individual Cas proteins in IB20 was fused with p300 and the transcription activation was tested.

[0130] FIG. 123 shows an example chimeric CAST system.

[0131] FIG. 124 shows the activities of example chimeric CAST systems in plasmid targeting in mammalian cells.

[0132] FIG. 125 shows the insertion positions example chimeric CAST systems.

[0133] FIGS. 126-127. The TnsD1 from both orthologs had an impact of the activity of the chimeric CAST.

[0134] FIGS. 128-130. Activities of the CAST systems with new NLSs in plasmid targeting.

[0135] FIGS. 131A-131B show targeting endogenous LINE1 gene in human cells by CAST IB20.

[0136] FIGS. 132A-132C: FIG. 132A shows targeting endogenous EMX1, DNMT1, SLC35A2 and VEGFA, and LE side genome-insertion junction confirmation by next generation sequencing. FIG. 132B shows confirmation for RE side. FIG. 132C shows the sequence reads of genome-insertion junction boundaries including target site duplication.

[0137] FIG. 133 shows dual modes of CRISPR-associated transposon homing.

[0138] FIGS. 134A-134C: CAST I-B loci architecture and comparison of the TniQ/TnsD target selectors. FIG. 134A shows schematic of the Anabaena variabilis ATCC 29413 CAST I-B subtype 1 (I-B1) locus and “Peltigera membranacea cyanobiont” 210A CAST I-B subtype 2 (I-B2) locus containing both Cascade proteins, Tn7-like proteins including TnsD and TniQ target selectors (FIGS. 139A-139C). FIG. 134B shows a dendrogram showing the similarity of TniQ/TnsD proteins of Tn7 and CAST I-B1 and I-B2, CAST I-F, and CAST V-K systems (FIGS. 139B and 139D). Dark purple indicates a similar N-terminal region (TniQ/TnsD core). Light purple indicates similarity between the C-terminal regions of Tn7-TnsD, CAST I-B1 TnsD, and remote similarity with CAST I-B2 TnsD (see FIG. 135,). Dashed lines indicate boundaries of TniQ/TnsD core. Light and dark yellow colors indicate the protein domains annotated from the CAST I-F TniQ structure (FIG. 139D). FIG. 134C shows phylogenetic tree built with FastTree (WAG model) (Price et al., 2009) from the core region (FIG. S3D) of TniQ/TnsD proteins from CAST I-B (TniQ in red; TnsD in purple), Tn7-TnsD (in green), CAST V-K TniQ (in yellow), and CAST I-F TniQ (in cyan). The tree indicates proximity between CAST I-B1 TnsD and Tn7-TnsD and the distinction between CAST I-B1 and CAST I-B2 (FIGS. 139B and 139D).

[0139] FIGS. 135A-135G: shows characterization of type I-B subtype1 AvCAST. FIG. 135A shows schematic of experiment to identify insertion direction, PAM, and insertion position by AvCAST in E. coli. FIG. 135B shows RNA sequence reads mapping to the minimal CRISPR array to reveal the mature crRNA sequence of AvCAST. FIG. 135C shows insertion directionality assayed by diagnostic PCR of pInsert on 6N PAM library plasmid with different primer pairs in DTniQ or DTnsD conditions. FIG. 135D shows quantification of insertion frequency in both directions by ddPCR. Data are represented as mean±SD. FIG. 135E shows Top: PAMs for AvCAST RNA-guided insertions. Bottom: AvCAST RNA-guided insertion positions identified by deep sequencing. FIG. 135F shows long-read Nanopore sequencing to characterize the structure of pInsert. FIG. 135G shows sanger sequencing chromatograms of a representative pInsert. PAM, AvPSP1, TSDs, and transposon ends are annotated. See also FIG. 140.

[0140] FIGS. 136A-136G: shows homing of AvCAST is mediated through conserved attTn7 recognition by TnsD. FIG. 136A shows RNA-guided insertion frequency of AvCAST into the pTarget with AvPSP1 and glmS gene at each DTniQ/DTnsD condition. Data are represented as mean±SD. FIG. 136B shows Tn7-like machinery-mediated insertion frequency into the pTarget with AvPSP1 and glmS gene at each DTniQ or DTnsD condition. Data are represented as mean±SD. FIG. 136C shows AvCAST-mediated single prominent insertion at glmS Tn7 attachment site on plasmid identified by deep sequencing. Purple bar indicates the position by Tn7-like machinery (tnsA, tnsB, tnsC, and tnsD). Blue bar indicates the position by all AvCAST protein components (Tn7-like machinery+TniQ+Cascade). Light blue bar indicates the insertion position on the plasmid harboring an additional 65 bp downstream sequence of A. variabilis glmS. FIG. 136D shows Tn7-like machinery-mediated insertion frequency of AvCAST into a plasmid bearing the A. variabilis glmS gene, a plasmid bearing mutations in the conserved attTn7 site, and a plasmid bearing the E. coli glmS gene. The 30 bp of the C terminus of glmS, a part of attTn7 identified by a previous study (Mitra et al., 2010), is shown. Base numbering format follows that of the study (end of glmS=+23), and reported essential positions for TnsD recognition are shown in red. Data are represented as mean±SD. FIG. 136E shows schematic of in vitro transposition reactions with purified Tn7-like machinery components of AvCAST. FIG. 136F shows Tn7-like machinery and donor requirements for in vitro transposition on E. coli glmS Tn7 attachment site. pInsert was detected by PCR for LE and RE junctions. FIG. 136G shows Tns protein requirements for in vitro transposition to the E. coli glmS Tn7 attachment site. All reactions contained pDonor and pTarget. See also FIG. 141.

[0141] FIGS. 137A-137H Type I-B subtype 2 PmcCAST system homes to tRNA-Val. FIG. 137A shows Top: PAMs for PmcCAST RNA-guided insertions. Bottom: AvCAST RNA-guided insertion positions identified by deep sequencing. FIG. 137B shows long-read nanopore sequencing to characterize the structure of pInsert. FIG. 137C shows schematic of experiment to compare RNA-guided transposition and homing to tRNA-Val by PmcCAST in E. coli. FIG. 137D shows RNA-guided insertion frequency of PmcCAST into the pTarget with PmcPSP1 and tRNA-Val gene at each DtniQ or DtnsD condition. Data are represented as mean±SD. FIG. 137E shows Tn7-like machinery-mediated insertion frequency of PmcCAST into pTarget at each DtniQ or DtnsD condition. Data are represented as mean±SD. FIG. 137F shows PmcCAST-mediated prominent insertion at tRNA-Val gene on target plasmid identified by deep sequencing. Purple bar indicates the position of all Tns proteins (TnsAB, TnsC, TniQ, and TnsD). Blue bar indicates the position of ΔTniQ condition. Light blue indicates the position at ΔTniD condition. White bar indicates the position at ΔTniQ ΔTniD conditions. FIG. 137G shows Tn7-like machinery and donor requirements for in vitro transposition on tRNA-Val gene. pInsert was detected for PCR for LE and RE junctions. FIG. 137H shows the Tris protein requirements for in vitro transposition for tRNA-Val gene. All reactions contained pDonor and pTarget.

[0142] FIGS. 138A-138B: Models of transposition mechanisms of CAST I-B and CAST V-K systems. FIG. 138A shows Prototypical loci organization of CAST I-B and CAST V-K systems. The loci are delimited by transposon ends (Tn ends, indicated as light vertical rectangle). Transposon core components (tnsA, tnsB, and tnsC in CAST I-B; tnsB and tnsC in CAST V-K) are colored in light blue while tniQ are indicated in purple with a lighter purple for tnsD. Cas components (Cascade and cas12k) are shown in gray. Conserved transcription factors (TF) are shown in pink. Locations of cargo genes are indicated with dark gray circles. CRISPR arrays are shown as gray triangles for the repeats and red diamonds for the spacers. The delocalized crRNA is indicated by a lighter triangle (partial repeat) and a truncated red diamond (short spacer). Homing target sites are colored in yellow. Horizontal light gray triangle indicates the tracrRNA in the CAST V-K locus. Conserved transcription factors (TF) are shown in light pink. FIG. 138B shows Models for CAST transposition to mobile element (donor cell in blue) and CAST homing transposition to bacterial chromosome (recipient cell in green). CAST transposition to mobile genetic elements is mediated by the Cas effector machinery (IB Cascade and crRNA or Cas12k, tracrRNA, and cRNA; Cas proteins are shown in gray) that recognizes the target site (red) with RNA-guided targeting to insert the transposon using Tn components. TniQ may function as an adaptor between Cas machinery and the transpososome (Tn core machinery bound to the DNA transposon). The mobile genetic element (MGE) where the transposon has inserted can be horizontally transferred (via horizontal gene transfer (HGT)) to another host where homing transposition can occur. CAST I-B homing transposition is mediated by TnsD (without Cas components), which targets the homing site (light orange) located in the bacterial chromosome (in green). CAST V-K uses a dedicated crRNA to target the homing site. See also FIG. S7.

[0143] FIGS. 139A-139D: CAST I-B loci comparison and TnsD/TniQ analysis, related to FIGS. 134 and 137. FIG. 139A shows left, CAST I-B1 loci sharing similar TniQ (non identical and greater than or equal to 50 percent sequence identity). Right, Loci sharing similar CAST I-B1 tnsD (greater than or equal to 50 percent sequence identity). tniQ is colored in red, transposon core genes (tnsA, tnsB, and tnsC) in blue, Cas components in yellow, glmS homing gene in green, CRISPR arrays are shown as thin empty red arrays, and tnsD in pink. Black arrows represent padding to center the tniQ or tnsD genes. Cyan indicates tnsE, a hallmark gene for targeting conjugative plasmids in Tn7. Loci centered on tnsD (right) include Tn7 loci (non-CAST) that also home to glmS(green). All loci are available in the Supplemental Dataset. FIG. 139B shows protein sequence alignment of CAST I-B1 TniQ (red), TnsD (purple), and Tn7-TnsD (green) sharing sequence similarity with CAST I-B1 TnsD. Sequences are ordered from a tree built with FastTree (WAG model) (Price et al., 2009). Blue highlights indicate the conserved core of TniQ/TnsD. On top of the alignment sequences are the consensus, the hydrophobicity graph (red), and the conservation graph (green). The alignment is colored using the Rasmol color palette; colored positions indicate conservation in agreement with the consensus sequence. Tn7 TnsD and CAST-IB TnsD are longer than TniQ, and are similar in their C-terminal region. FIG. 139C shows CAST I-B2 loci sharing similar TniQ (non identical and greater than or equal to 50 percent sequence identity). tniQ is colored in red, transposon core genes (tnsAB and tnsC) in blue, Cas components in yellow, tRNA homing gene in green, CRISPR arrays are shown as thin empty red arrays, and tnsD in pink. FIG. 139D shows Protein alignment of TniQ/TnsD core region from CAST I-B TniQ (red), TnsD (purple), and Tn7-TnsD (green), CAST I-F TniQ (light green), and CAST V-K TniQ (orange). On top of the alignment sequences are the consensus and the conservation graph (green). The alignment is colored using the Rasmol color palette; colored positions indicate conservation in agreement with the consensus sequence. Domain annotation of TniQ dimer mapped on the electron microscopy structure (PDB: 6pij) (Halpin-Healy et al., 2020) of CAST I-F TniQ. The different colors indicate the potential domains of TniQ, from N-terminal to C-terminal, blue, green, orange, and red. TniQ/TnsD core (red dashed line) is formed by the blue and the green domain (region conserved in CAST TniQ/TnsD and Tn7-TnsD). Black dashed lines indicate interaction with Cascade components found in the structure.

[0144] FIGS. 140A-140E: RNA-guided transposition on E. coli genome by type I-B subtype1 AvCAST, related to FIG. 135. FIG. 140A shows AvCAST RNA-guided E. coli genomic insertions at 10 targeted loci. Representative data for LE junction amplification are shown. FIG. 140B shows insertion frequency for 36 targeted loci (AvPSP2-37) quantified by ddPCR. Data are represented as mean±SD. FIG. 140C shows Type I-B subtype1 AvCAST RNA-guided insertion positions on 36 targeted loci by deep sequencing. Both RE and LE junctions were sequenced and representative insertion reads at each position measured by LE junction data are provided. Insertion at PSPs indicated in red were below the limit of detection (few or no insertion reads). FIG. 140D shows comparison of insertion frequency between pSC101 and pBluescript donors. Data are represented as mean±SD. FIG. 140E shows TTISS analysis of three representative loci (AvPSP2, AvPSP7, and AvPSP12) to test insertion specificity of AvCAST. Reads are mapped on CP001509 E. coli BL21(DE3) complete genome. FIGS. 141A-141F: Type I-B subtype1 AvCAST system homes to glmS, related to FIG. 136. FIG. 141A shows Alignment of CAST-IB1 loci at the insertion site. Ends of glmS are highlighted in orange while the CAST left end (LE) is shown in gray. Only 2 identical contigs have the transposon inserted 5-bp downstream of glmS while all other transposons are inserted about 24-bp downstream of the homing target site. FIG. 141B shows Deep sequencing reads showing Tn7-like machinery of AvCAST mediates a single prominent insertion at glmS Tn7 attachment site on plasmids. Purple bar indicates the insertion position on the plasmid harboring E. coli glmS. Blue bar indicates the insertion position on the plasmid harboring A. variabilis glmS. FIG. 141C shows Tn7-like machinery-mediated insertion frequency at the glmS gene on the E. coli BL21(DE3) genome in the absence of TniQ, TnsD, or both. Data are represented as mean±SD. FIG. 141D shows Sanger sequencing chromatograms for RE and LE junctions of insertion at the endogenous glmS Tn7 attachment site on E. coli BL21(DE3) genome. “GCGGG” is target site duplication as a signature of Tn7-like transposition. FIG. 141E shows AvCAST-mediated single prominent insertion at the endogenous glmS Tn7 attachment site on E. coli BL21(DE3) genome identified by deep sequencing. Left: with all Tn7-like machinery of AvCAST; right: with all AvCAST proteins including TniQ and Cascade proteins. FIG. 141F shows Purified Tn7-like machinery components of AvCAST on Coomassie Brilliant Blue stained SDS-PAGE gel.

[0145] FIGS. 142A-142E: Characterization of type I-B subtype2 PmcCAST, related to FIG. 137. FIG. 142A shows RNA sequence reads mapping to the minimal CRISPR array showing the mature crRNA sequence of PmcCAST. FIG. 142B shows Insertion directionality assayed by diagnostic PCR of pInsert on 6N PAM library plasmid with different primer pairs in DTniQ or DTnsD conditions. FIG. 142C shows Quantification of insertion frequency across the LE and RE junctions by ddPCR. Data are represented as mean±SD FIG. 142D shows Sanger sequencing chromatograms of a representative pInsert. PAM, PmcPSP1, TSDs, transposon ends are annotated. FIG. 142E shows Coomassie Brilliant Blue stained SDS-PAGE gel for purified Tn7-like machinery components of PmcCAST.

[0146] FIGS. 143A-143B: Models comparing CAST V-K (FIG. 143A) and CAST I-F (FIG. 143B), related to FIG. 138. Prototypical locus organization of CAST V-K systems and CAST I-F systems and models for CAST transposition to mobile element (donor cell in blue) and CAST homing transposition to bacterial chromosome (recipient cell in green). The loci are delimited by transposon ends (Tn ends, indicated as light vertical rectangles). Transposon core components (tnsA, tnsB, and tnsC in CAST I-F; tnsB and tnsC in CAST V-K) are colored in light blue while tniQ is colored in dark blue. Cas components (Cascade I-F and cas12k) are shown in gray. Conserved transcription factors (TF) are shown in pink. Locations of cargo genes are indicated with dark gray circles. CRISPR arrays are shown as gray triangles for the repeats, and red diamonds for the spacers. In CAST V-K the delocalized crRNA is indicated by a lighter triangle (partial repeat), and a truncated orange diamond (short spacer). In CAST I-F the homing spacer (targeting the homing target site) is indicated as a light orange diamond located at the distal spacer of the CRISPR-array. Homing target genes are colored in large yellow rectangles. Horizontal light gray triangle indicates the tracrRNA in the CAST V-K locus. CAST transposition to mobile genetic elements is mediated by the Cas effector machinery (I-F Cascade and crRNA or Cas12k, tracrRNA, and cRNA) which recognizes the target site (red) with RNA-guided targeting to insert the transposon using Tn components. For homing transposition, CAST V-K uses a dedicated crRNA (spacer in light orange) bearing a truncated spacer to target the homing site while CAST I-F uses a dedicated spacer, either located at the distal region of the CRISPR array or delocalized, to target the homing target site often with numerous mismatches between spacer and target (Petassi et al. 2020).

[0147] The figures herein are for illustrative purposes only and are not necessarily drawn to scale.

### DETAILED DESCRIPTION OF THE EXAMPLE EMBODIMENTS

### General Definitions

[0148] Unless defined otherwise, technical and scientific terms used herein have the same meaning as commonly understood by one of ordinary skill in the art to which this disclosure pertains. Definitions of common terms and techniques in molecular biology may be found in Molecular Cloning: A Laboratory Manual, 2^{nd} edition (1989) (Sambrook, Fritsch, and Maniatis); Molecular Cloning: A Laboratory Manual, 4^{th} edition (2012) (Green and Sambrook); Current Protocols in Molecular Biology (1987) (F. M. Ausubel et al. eds.); the series Methods in Enzymology (Academic Press, Inc.): PCR 2: A Practical Approach (1995) (M. J. MacPherson, B. D. Hames, and G. R. Taylor eds.): Antibodies, A Laboratory Manual (1988) (Harlow and Lane, eds.): Antibodies A Laboratory Manual, 2^{nd} edition 2013 (E. A. Greenfield ed.); Animal Cell Culture (1987) (R. I. Freshney, ed.); Benjamin Lewin, Genes IX, published by Jones and Bartlet, 2008 (ISBN 0763752223); Kendrew et al. (eds.), The Encyclopedia of Molecular Biology, published by Blackwell Science Ltd., 1994 (ISBN 0632021829); Robert A. Meyers (ed.), Molecular Biology and Biotechnology: a Comprehensive Desk Reference, published by VCH Publishers, Inc., 1995 (ISBN 9780471185710); Singleton et al., Dictionary of Microbiology and Molecular Biology 2nd ed., J. Wiley & Sons (New York, N.Y. 1994), March, Advanced Organic Chemistry Reactions, Mechanisms and Structure 4th ed., John Wiley & Sons (New York, N.Y. 1992); and Marten H. Hofker and Jan van Deursen, Transgenic Mouse Methods and Protocols, 2^{nd} edition (2011).

[0149] As used herein, the singular forms “a” “an”, and “the” include both singular and plural referents unless the context clearly dictates otherwise.

[0150] The term “optional” or “optionally” means that the subsequent described event, circumstance or substituent may or may not occur, and that the description includes instances where the event or circumstance occurs and instances where it does not.

[0151] The recitation of numerical ranges by endpoints includes all numbers and fractions subsumed within the respective ranges, as well as the recited endpoints.

[0152] The term “about” in relation to a reference numerical value and its grammatical equivalents as used herein can include the numerical value itself and a range of values plus or minus 10% from that numerical value. For example, the amount “about 10” includes 10 and any amounts from 9 to 11. For example, the term “about” in relation to a reference numerical value can also include a range of values plus or minus 10%, 9%, 8%, 7%, 6%, 5%, 4%, 3%, 2%, or 1% from that value.

[0153] As used herein, a “biological sample” may contain whole cells and/or live cells and/or cell debris. The biological sample may contain (or be derived from) a “bodily fluid”. The present invention encompasses embodiments wherein the bodily fluid is selected from amniotic fluid, aqueous humour, vitreous humour, bile, blood serum, breast milk, cerebrospinal fluid, cerumen (earwax), chyle, chyme, endolymph, perilymph, exudates, feces, female ejaculate, gastric acid, gastric juice, lymph, mucus (including nasal drainage and phlegm), pericardial fluid, peritoneal fluid, pleural fluid, pus, rheum, saliva, sebum (skin oil), semen, sputum, synovial fluid, sweat, tears, urine, vaginal secretion, vomit and mixtures of one or more thereof. Biological samples include cell cultures, bodily fluids, cell cultures from bodily fluids. Bodily fluids may be obtained from a mammal organism, for example by puncture, or other collecting or sampling procedures.

[0154] The terms “subject,” “individual,” and “patient” are used interchangeably herein to refer to a vertebrate, preferably a mammal, more preferably a human. Mammals include, but are not limited to, murines, simians, humans, farm animals, sport animals, and pets. Tissues, cells and their progeny of a biological entity obtained in vivo or cultured in vitro are also encompassed.

[0155] The term “exemplary” is used herein to mean serving as an example, instance, or illustration. Any aspect or design described herein as “exemplary” is not necessarily to be construed as preferred or advantageous over other aspects or designs. Rather, use of the word exemplary is intended to present concepts in a concrete fashion.

[0156] A protein or nucleic acid derived from a species means that the protein or nucleic acid has a sequence identical to an endogenous protein or nucleic acid or a portion thereof in the species. The protein or nucleic acid derived from the species may be directly obtained from an organism of the species (e.g., by isolation), or may be produced, e.g., by recombination production or chemical synthesis.

[0157] Various embodiments are described hereinafter. It should be noted that the specific embodiments are not intended as an exhaustive description or as a limitation to the broader aspects discussed herein. One aspect described in conjunction with a particular embodiment is not necessarily limited to that embodiment and can be practiced with any other embodiment(s). Reference throughout this specification to “one embodiment”, “an embodiment,” “an example embodiment,” means that a particular feature, structure or characteristic described in connection with the embodiment is included in at least one embodiment of the present invention. Thus, appearances of the phrases “in one embodiment,” “in an embodiment,” or “an example embodiment” in various places throughout this specification are not necessarily all referring to the same embodiment, but may. Furthermore, the particular features, structures or characteristics may be combined in any suitable manner, as would be apparent to a person skilled in the art from this disclosure, in one or more embodiments. Furthermore, while some embodiments described herein include some but not other features included in other embodiments, combinations of features of different embodiments are meant to be within the scope of the invention. For example, in the appended claims, any of the claimed embodiments can be used in any combination.

[0158] All publications, published patent documents, and patent applications cited herein are hereby incorporated by reference to the same extent as though each individual publication, published patent document, or patent application was specifically and individually indicated as being incorporated by reference.

### Overview

[0159] The present disclosure provides engineered systems and methods for inserting a polynucleotide to a desired position in a target nucleic acid. In general, the systems comprise one or more transposases or functional fragments thereof, and one or more components of a sequence-specific nucleotide binding system, e.g., a Cas protein and a guide molecule.

[0160] In some embodiments, the present disclosure provides engineered systems comprising one or more CRISPR-associated Tn7 transposase polypeptides (e.g., TnsA, TnsB, TnsC, and/or TniQ; or TnsA, TnsB, TnsC, and/or TnsD) and one or more Type I-B Cas proteins. The systems may further comprise a guide molecule capable of complexing with the Cas protein and directing binding of the guide-Cas protein complex to a target polynucleotide. The present disclosure also includes polynucleotides encoding components of the nucleic acid targeting systems, and vector systems comprising one or more vectors comprising said polynucleotide. Further provided herein also includes cells, tissues, organs, and organisms comprising the systems or generated using the systems.

### Systems and Compositions

[0161] In one aspect, the present disclosure includes systems that comprise one or more transposases and nucleotide-binding molecules (e.g., nucleotide-binding proteins). The nucleotide binding proteins may be sequence-specific. The system may further comprise one or more transposon components. In some embodiments, the systems described herein may comprise a transposase(s) that is associated with, linked to, bound to, or otherwise capable of forming a complex with a sequence-specific nucleotide-binding system. In certain example embodiments, the one or more transposases and the sequence-specific nucleotide-binding system are associated by co-regulation or expression. In other example embodiments, the transposase(s) and sequence-specific nucleotide binding system are associated by the ability of the sequence-specific nucleotide-binding domain to direct or recruit the transposase(s) to an insertion site where the transposase(s) direct insertion of a donor polynucleotide into a target polynucleotide sequence. A sequence-specific nucleotide-binding system may be a sequence-specific DNA-binding protein, or functional fragment thereof, and/or sequence-specific RNA-binding protein or functional fragment thereof. In some embodiments, a sequence-specific nucleotide-binding component may be a CRISPR-Cas system, a transcription activator-like effector nuclease, a Zn finger nuclease, a meganuclease, a functional fragment, a variant thereof, of any combination thereof. Accordingly, the system may also be considered to comprise a nucleotide binding component and a transposase. For ease of reference, further example embodiments will be discussed in the context of example Cas-associated transposase systems.

[0162] In some examples, the system may be an engineered system, the system comprising one or more CRISPR-associated Tn7 transposase polypeptides or functional fragments thereof, one or more Type I-B Cas proteins; and a guide molecule capable of complexing with the Cas protein and directing binding of the guide-Cas protein complex to a target polynucleotide.

[0163] In certain examples, the system may comprise polynucleotides with sequences encoding the one or more transposases, Cas proteins, and guide sequences.

[0164] The system may be used to target various types of target polynucleotides. In some examples, the target polynucleotides may be linear DNA. In some examples, the target polynucleotides may be circular (e.g., supercoiled) DNA such as plasmids. In some examples, the target polynucleotides may genomic DNA. The target polynucleotide may be a polynucleotide in a eukaryotic cell. For example, the target polynucleotide may be a polynucleotide in the genome of a eukaryotic cell. The genome may be the nuclear genome, mitochondrial genome, or chloroplast genome. The target polynucleotide may be an endogenous polynucleotide in a eukaryotic cell.

[0165] When a term refers to a protein, e.g., Cas protein, transposase, etc., the term encompasses both the full-length of the protein as well as a functional fragment of the protein. The term “functional fragment” means that the sequence of the polypeptide may include less amino-acid than the original sequence but still enough amino-acids to confer the enzymatic activity of the original sequence of reference. It is well known in the art that a polypeptide can be modified by substitution, insertion, deletion and/or addition of one or more amino-acids while retaining its enzymatic activity. For example, substitutions of one amino-acid at a given position by chemically equivalent amino-acids that do not affect the functional properties of a protein are common.

### Transposons and Transposases

[0166] The systems herein may comprise one or more components of a transposon and/or one or more transposases. The transposases in the systems herein may be CRISPR-associated transposases (also used interchangeably with Cas-associated transposases, CRISPR-associated transposase proteins herein) or functional fragments thereof. CRISPR-associated transposases may include any transposases that can be directed to or recruited to a region of a target polynucleotide by sequence-specific binding of a CRISPR-Cas complex. CRISPR-associated transposases may include any transposases that associate (e.g., form a complex) with one or more components in a CRISPR-Cas system, e.g., Cas protein, guide molecule etc.). In certain example embodiments, CRISPR-associated transposases may be fused or tethered (e.g. by a linker) to one or more components in a CRISPR-Cas system, e.g., Cas protein, guide molecule etc.).

[0167] The term “transposon”, as used herein, refers to a polynucleotide (or nucleic acid segment), which may be recognized by a transposase or an integrase enzyme and which is a component of a functional nucleic acid-protein complex (e.g., a transpososome, or transposon complex) capable of transposition. Transposons employ a variety of regulatory mechanisms to maintain transposition at a low frequency and sometimes coordinate transposition with various cell processes. Some prokaryotic transposons can also mobilize functions that benefit the host or otherwise help maintain the element.

[0168] The term “transposase” as used herein refers to an enzyme, which is a component of a functional nucleic acid-protein complex capable of transposition and which mediates transposition. The transposase may comprise a single protein or comprise multiple protein sub-units. A transposase may be an enzyme capable of forming a functional complex with a transposon end or transposon end sequences. The term “transposase” may also refer in certain embodiments to integrases. The expression “transposition reaction” used herein refers to a reaction wherein a transposase inserts a donor polynucleotide sequence in or adjacent to an insertion site on a target polynucleotide. The insertion site may contain a sequence or secondary structure recognized by the transposase and/or an insertion motif sequence where the transposase cuts or creates staggered breaks in the target polynucleotide into which the donor polynucleotide sequence may be inserted. Exemplary components in a transposition reaction include a transposon, comprising the donor polynucleotide sequence to be inserted, and a transposase or an integrase enzyme. The term “transposon end sequence” as used herein refers to the nucleotide sequences at the distal ends of a transposon. The transposon end sequences may be responsible for identifying the donor polynucleotide for transposition. The transposon end sequences may be the DNA sequences the transpose enzyme uses in order to form transpososome complex and to perform a transposition reaction.

[0169] In some embodiments, the system comprises one or more Tn7 transposase polypeptides. In some embodiments, three transposon-encoded proteins form the core transposition machinery of Tn7: a heteromeric transposase (TnsA and TnsB) and a regulator protein (TnsC). In addition to the core TnsABC transposition proteins, Tn7 elements encode dedicated target site-selection proteins, TnsD and TnsE. In conjunction with TnsABC, the sequence-specific DNA-binding protein TnsD directs transposition into a conserved site referred to as the “Tn7 attachment site,” attTn7. TnsD is a member of a large family of proteins that also includes TniQ, a protein found in other types of bacterial transposons. TniQ has been shown to target transposition into resolution sites of plasmids. As used herein, a TniQ transposase may be a TnsD transposase. In some examples, the Tn7 comprises a transposase that has the activities of typical TnsA and TnsB. In some examples, the transposase is not a fusion protein of typical TnsA and TnsB. An example of the transposase is TnsA in I1320.

[0170] Examples of Tn7 transposase polypeptides include TnsA, TnsB, TnsC, TniQ, TnsD, and TnsE. In some embodiments, the system comprises TnsA, TnsB, TnsC, and/or TniQ. In some embodiments, the system comprises TnsA, TnsB, TnsC, and/or TnsD (e.g., TnsD2). In some examples, the system comprises TnsA, TnsB, TnsC, and TniQ (e.g., TniQ2). In some examples, the system comprises TnsA, TnsB, TnsC, and TnsD (e.g., TnsD2). In some examples, the system comprises two or more TnsA. In some examples, the system comprises two or more TnsA (e.g., 2 TnsA). In some examples, the system comprises two or more TnsB (e.g., 2 TnsB). In some examples, the system comprises two or more TnsC (e.g., 2 TnsC). In some examples, the system comprises two or more TnsD (e.g., 2 TnsDs). In some examples, the system comprises two or more TniQ (e.g., 2 TniQs). The TniQ or TnsD may comprise a DNA-binding domain. The DNA-binding domain may be at the C terminus of the TniQ or TnsD. In some cases, the DNA-binding domain may be at the N terminus, or between the N- and C-termini of the TniQ or TnsD. In some cases, the system comprises TnsA, TnsB, TnsC, and only one TniQ or TnsD, e.g., such TniQ or TnsD may comprise a DNA-binding domain. In a particular example, the system comprises TnsA, TnsB, TnsC, and TnsD1. In another example, the system comprises TnsA, TnsB, TnsC, and TnsD2. In another example, the system comprises TnsA, TnsB, TnsC, TnsD1, and TnsD2. Two or more of the components in the system may be comprised in a single protein (e.g., fusion protein). For example, TnsA and TnsB may be comprised in a single protein.

[0171] In some embodiments, the system comprises one or more polynucleotides encoding one or more of the Tn7 transposase polypeptides. In some examples, the system comprises one or more polynucleotides encoding TnsA. In some examples, the system comprises one or more polynucleotides encoding TnsB. In some examples, the system comprises one or more polynucleotides encoding TnsC. In some examples, the system comprises one or more polynucleotides encoding TnsD. In some examples, the system comprises one or more polynucleotides encoding TnsE. In some examples, the system comprises one or more polynucleotides encoding TniQ. The system may comprise two or more polynucleotides encoding the same type of transposase. In one example, the system may comprise two or more polynucleotides encoding TnsA (the same or different TnsA). In one example, the system may comprise two or more polynucleotides encoding TnsB (the same or different TnsB). In one example, the system may comprise two or more polynucleotides encoding TnsC (the same or different TnsC). In one example, the system may comprise two or more polynucleotides encoding TnsD (the same or different TnsD). In one example, the system may comprise two or more polynucleotides encoding TnsE (the same or different TnsE). In one example, the system may comprise two or more polynucleotides encoding TniQ (the same or different TniQ).

[0172] As used herein, a right end sequence element or a left end sequence element are made in reference to an example Tn7 transposon. The general structure of the left end (LE) and right end (RE) sequence elements of canonical Tn7 is established. Tn7 ends comprise a series of 22-bp TnsB-binding sites. Flanking the most distal TnsB-binding sites is an 8-bp terminal sequence ending with 5′-TGT-3′/3′-ACA-5′. The right end of Tn7 contains four overlapping TnsB-binding sites in the ˜90-bp right end element. The left end contains three TnsB-binding sites dispersed in the ˜150-bp left end of the element. The number and distribution of TnsB-binding sites can vary among Tn7-like elements. End sequences of Tn7-related elements can be determined by identifying the directly repeated 5-bp target site duplication, the terminal 8-bp sequence, and 22-bp TnsB-binding sites (Peters J E et al., 2017). Example Tn7 elements, including right end sequence element and left end sequence element include those described in Parks A R, Plasmid, 2009 January; 61(1):1-14.

[0173] As used herein, Tn7 transposons and transposases include Tn7-like transposons and transposases.

### Donor Polynucleotides

[0174] The systems may comprise one or more donor polynucleotides (e.g., for insertion into the target polynucleotide). A donor polynucleotide may be an equivalent of a transposable element that can be inserted or integrated to a target site. For example, the donor polynucleotide may comprise a polynucleotide to be inserted, a left element sequence, and a right element sequence. The donor polynucleotide may be or comprise one or more components of a transposon. A donor polynucleotide may be any type of polynucleotides, including, but not limited to, a gene, a gene fragment, a non-coding polynucleotide, a regulatory polynucleotide, a synthetic polynucleotide, etc.

[0175] In some embodiments, the donor polynucleotide is linear. In some embodiments, the donor polynucleotide is circular. In some examples, the donor polynucleotide has a single strand break (a nick). In some cases, the single strand break is on or close to the 3′ end of the donor polynucleotide. In some cases, the single strand break is on or close to the 5′ end of the donor polynucleotide.

[0176] In some embodiments, the donor polynucleotide is inserted to a site no more than 80, no more 90, no more 100, no more 200, or no more 300 bp 3′ of the PAM. In some examples, the donor polynucleotide is inserted to a site that is 70, 71, 72, 73, 74, 75, 76, 77, 78, 79, 80, 81, 82, 83, 84, 85, 86, 87, 88, 89, 90, 91, 92, 93, 94, 95, 96, 97, 98, 99, 100, 101, 102, 103, 104, 105, 106, 107, 108, 109, 110, 111, 112, 113, 114, 115, 116, 117, 118, 119, 120, 121, 122, 123, 124, 125, 126, 127, 128, 129, 130, 131, 132, 133, 134, 135, 136, 137, 138, 139, 140, 141, 142, 143, 144, 145, 146, 147, 148, 149, 150, 151, 152, 153, 154, 155, 156, 157, 158, 159, 160, 161, 162, 163, 164, 165, 166, 167, 168, 169, 170, 171, 172, 173, 174, 175, 176, 177, 178, 179, 180, 181, 182, 183, 184, 185, 186, 187, 188, 189, 190, 191, 192, 193, 194, 195, 196, 197, 198, 199, 200, 201, 202, 203, 204, 205, 206, 207, 208, 209, 210, 211, 212, 213, 214, 215, 216, 217, 218, 219, 220, 221, 222, 223, 224, 225, 226, 227, 228, 229, 230, 231, 232, 233, 234, 235, 236, 237, 238, 239, 240, 241, 242, 243, 244, 245, 246, 247, 248, 249, 250, 251, 252, 253, 254, 255, 256, 257, 258, 259, 260, 261, 262, 263, 264, 265, 266, 267, 268, 269, 270, 271, 272, 273, 274, 275, 276, 277, 278, 279, 280, 281, 282, 283, 284, 285, 286, 287, 288, 289, 290, 291, 292, 293, 294, 295, 296, 297, 298, 299, or 300 bp 3′ of the PAM.

[0177] In some embodiments, the donor polynucleotide is inserted to a site no more than 80, no more 90, no more 100, no more 200, or no more 300 bp 5′ of the PAM. In some examples, the donor polynucleotide is inserted to a site that is 70, 71, 72, 73, 74, 75, 76, 77, 78, 79, 80, 81, 82, 83, 84, 85, 86, 87, 88, 89, 90, 91, 92, 93, 94, 95, 96, 97, 98, 99, 100, 101, 102, 103, 104, 105, 106, 107, 108, 109, 110, 111, 112, 113, 114, 115, 116, 117, 118, 119, 120, 121, 122, 123, 124, 125, 126, 127, 128, 129, 130, 131, 132, 133, 134, 135, 136, 137, 138, 139, 140, 141, 142, 143, 144, 145, 146, 147, 148, 149, 150, 151, 152, 153, 154, 155, 156, 157, 158, 159, 160, 161, 162, 163, 164, 165, 166, 167, 168, 169, 170, 171, 172, 173, 174, 175, 176, 177, 178, 179, 180, 181, 182, 183, 184, 185, 186, 187, 188, 189, 190, 191, 192, 193, 194, 195, 196, 197, 198, 199,200, 201, 202, 203, 204, 205, 206, 207, 208, 209, 210, 211, 212, 213, 214, 215, 216, 217, 218, 219, 220, 221, 222, 223, 224, 225, 226, 227, 228, 229, 230, 231, 232, 233, 234, 235, 236, 237, 238, 239, 240, 241, 242, 243, 244, 245, 246, 247, 248, 249, 250, 251, 252, 253, 254, 255, 256, 257, 258, 259, 260, 261, 262, 263, 264, 265, 266, 267, 268, 269, 270, 271, 272, 273, 274, 275, 276, 277, 278, 279, 280, 281, 282, 283, 284, 285, 286, 287, 288, 289, 290, 291, 292, 293, 294, 295, 296, 297, 298, 299, or 300 bp 5′ of the PAM.

[0178] A target polynucleotide may comprise a protospacer adjacent motif (PAM) sequence. An example of the PAM sequence is AT.

[0179] The donor polynucleotides may be inserted to the upstream or downstream of the PAM sequence of a target polynucleotide. For CRISPR-associated transposases, the donor polynucleotide may be inserted at a position between 10 bases and 200 bases, e.g., between 20 bases and 150 bases, between 30 bases and 100 bases, between 45 bases and 70 bases, between 45 bases and 60 bases, between 55 bases and 70 bases, between 49 bases and 56 bases or between 60 bases and 66 bases, from a PAM sequence on the target polynucleotide. In some cases, the insertion is at a position upstream of the PAM sequence. In some cases, the insertion is at a position downstream of the PAM sequence. In some cases, the insertion is at a position from 49 to 56 bases or base pairs downstream from a PAM sequence. In some cases, the insertion is at a position from 60 to 66 bases or base pairs downstream from a PAM sequence.

[0180] The donor polynucleotide may be used for editing the target polynucleotide. In some cases, the donor polynucleotide comprises one or more mutations to be introduced into the target polynucleotide. Examples of such mutations include substitutions, deletions, insertions, or a combination thereof. The mutations may cause a shift in an open reading frame on the target polynucleotide. In some cases, the donor polynucleotide alters a stop codon in the target polynucleotide. For example, the donor polynucleotide may correct a premature stop codon. The correction may be achieved by deleting the stop codon or introduces one or more mutations to the stop codon. In other example embodiments, the donor polynucleotide addresses loss of function mutations, deletions, or translocations that may occur, for example, in certain disease contexts by inserting or restoring a functional copy of a gene, or functional fragment thereof, or a functional regulatory sequence or functional fragment of a regulatory sequence. A functional fragment refers to less than the entire copy of a gene by providing sufficient nucleotide sequence to restore the functionality of a wild type gene or non-coding regulatory sequence (e.g. sequences encoding long non-coding RNA). In certain example embodiments, the systems disclosed herein may be used to replace a single allele of a defective gene or defective fragment thereof. In another example embodiment, the systems disclosed herein may be used to replace both alleles of a defective gene or defective gene fragment. A “defective gene” or “defective gene fragment” is a gene or portion of a gene that when expressed fails to generate a functioning protein or non-coding RNA with functionality of a the corresponding wild-type gene. In certain example embodiments, these defective genes may be associated with one or more disease phenotypes. In certain example embodiments, the defective gene or gene fragment is not replaced but the systems described herein are used to insert donor polynucleotides that encode gene or gene fragments that compensate for or override defective gene expression such that cell phenotypes associated with defective gene expression are eliminated or changed to a different or desired cellular phenotype.

[0181] In certain embodiments of the invention, the donor may include, but not be limited to, genes or gene fragments, encoding proteins or RNA transcripts to be expressed, regulatory elements, repair templates, and the like. According to the invention, the donor polynucleotides may comprise left end and right end sequence elements that function with transposition components that mediate insertion.

[0182] In certain cases, the donor polynucleotide manipulates a splicing site on the target polynucleotide. In some examples, the donor polynucleotide disrupts a splicing site. The disruption may be achieved by inserting the polynucleotide to a splicing site and/or introducing one or more mutations to the splicing site. In certain examples, the donor polynucleotide may restore a splicing site. For example, the polynucleotide may comprise a splicing site sequence.

[0183] The donor polynucleotide to be inserted may has a size from 10 bases to 50 kb in length, e.g., from 50 to 40 kb, from 100 and 30 kb, from 100 bases to 300 bases, from 200 bases to 400 bases, from 300 bases to 500 bases, from 400 bases to 600 bases, from 500 bases to 700 bases, from 600 bases to 800 bases, from 700 bases to 900 bases, from 800 bases to 1000 bases, from 900 bases to from 1100 bases, from 1000 bases to 1200 bases, from 1100 bases to 1300 bases, from 1200 bases to 1400 bases, from 1300 bases to 1500 bases, from 1400 bases to 1600 bases, from 1500 bases to 1700 bases, from 600 bases to 1800 bases, from 1700 bases to 1900 bases, from 1800 bases to 2000 bases, from 1900 bases to 2100 bases, from 2000 bases to 2200 bases, from 2100 bases to 2300 bases, from 2200 bases to 2400 bases, from 2300 bases to 2500 bases, from 2400 bases to 2600 bases, from 2500 bases to 2700 bases, from 2600 bases to 2800 bases, from 2700 bases to 2900 bases, or from 2800 bases to 3000 bases in length.

### CRISPR-Cas Systems

[0184] The systems herein may comprise one or more components of a CRISPR-Cas system. The one or more components of the CRISPR-Cas system may serve as the nucleotide-binding component in the systems. The nucleotide-binding molecule may be a Cas protein (used interchangeably with CRISPR protein, CRISPR enzyme, Cas effector, CRISPR-Cas protein, CRISPR-Cas enzyme), a fragment thereof, or a mutated form thereof. The Cas protein may have reduced or no nuclease activity. For example, the Cas protein may be an inactive or dead Cas protein (dCas). The dead Cas protein may comprise one or more mutations or truncations. In some examples, the DNA binding domain comprises one or more Class I (e.g., Type I, Type III, Type IV) or Class 2 (e.g., Type II, Type V, or Type VI) CRISPR-Cas proteins. In certain embodiments, the sequence-specific nucleotide binding domains directs a transposon to a target site comprising a target sequence and the transposase directs insertion of a donor polynucleotide sequence at the target site. In certain example embodiments, the transposon component includes, associates with, or forms a complex with a CRISPR-Cas complex. In one example embodiment, the CRISPR-Cas component directs the transposon component and/or transposase(s) to a target insertion site where the transposon component directs insertion of the donor polynucleotide into a target nucleic acid sequence.

[0185] In general, a CRISPR-Cas or CRISPR system as used in herein and in documents, such as International Patent Publication No. WO 2014/093622 (PCT/US2013/074667), refers collectively to transcripts and other elements involved in the expression of or directing the activity of CRISPR-associated (“Cas”) genes, including sequences encoding a Cas gene, a tracr (trans-activating CRISPR) sequence (e.g. tracrRNA or an active partial tracrRNA), a tracr-mate sequence (encompassing a “direct repeat” and a tracrRNA-processed partial direct repeat in the context of an endogenous CRISPR system), a guide sequence (also referred to as a “spacer” in the context of an endogenous CRISPR system), or “RNA(s)” as that term is herein used (e.g., RNA(s) to guide Cas, such as Cas9, e.g. CRISPR RNA and transactivating (tracr) RNA or a single guide RNA (sgRNA) (chimeric RNA)) or other sequences and transcripts from a CRISPR locus. In general, a CRISPR system is characterized by elements that promote the formation of a CRISPR complex at the site of a target sequence (also referred to as a protospacer in the context of an endogenous CRISPR system). See, e.g., Shmakov et al. (2015) “Discovery and Functional Characterization of Diverse Class 2 CRISPR-Cas Systems”, Molecular Cell, DOI: dx.doi.org/10.1016/j.molcel.2015.10.008.

[0186] In certain embodiments, a protospacer adjacent motif (PAM) or PAM-like motif directs binding of the effector protein complex as disclosed herein to the target locus of interest. In some embodiments, the PAM may be a 5′ PAM (i.e., located upstream of the 5′ end of the protospacer). In other embodiments, the PAM may be a 3′ PAM (i.e., located downstream of the 5′ end of the protospacer). The term “PAM” may be used interchangeably with the term “PFS” or “protospacer flanking site” or “protospacer flanking sequence”.

[0187] In a preferred embodiment, the CRISPR effector protein may recognize a 3′ PAM. In certain embodiments, the CRISPR effector protein may recognize a 3′ PAM which is 5′H, wherein H is A, C or U.

[0188] In the context of formation of a CRISPR complex, “target sequence” refers to a sequence to which a guide sequence is designed to have complementarity, where hybridization between a target sequence and a guide sequence promotes the formation of a CRISPR complex. A target sequence may comprise RNA polynucleotides. The term “target RNA” refers to a RNA polynucleotide being or comprising the target sequence. In other words, the target RNA may be a RNA polynucleotide or a part of a RNA polynucleotide to which a part of the gRNA, i.e. the guide sequence, is designed to have complementarity and to which the effector function mediated by the complex comprising CRISPR effector protein and a gRNA is to be directed. In some embodiments, a target sequence is located in the nucleus or cytoplasm of a cell.

[0189] The CRISPR-Cas systems herein may comprise a Cas protein and a guide molecule. In some embodiments, the system comprises one or more Cas proteins. The Cas proteins may be Type 1 Cas proteins, e.g., Cas proteins of Type I CRISPR-Cas systems.

[0190] In certain example embodiments, the CRISPR-Cas system is a Class 1 CRISPR-Cas system, e.g., a Class 1 Type I CRISPR-Cas system. In some cases, a Class I CRISPR-Cas system comprises Cascade (a multimeric complex comprising three, four, or five proteins that processes crRNA arrays), Cas3 (a protein with nuclease, helicase, and exonuclease activity that is responsible for degradation of the target DNA), and crRNA (stabilizes Cascade complex and directs Cascade and Cas3 to DNA target). In example embodiments, Class 1 CRISPR-Cas systems comprising Cas 3 and/or Cas3″ comprise single-stranded and/or double-stranded nuclease catalytic activity, i.e., they are catalytically-active systems against target polynucleotides. In example embodiments, Class 1 CRISPR-Cas systems not comprising Cas 3 and/or Cas3″ do not comprise single-stranded and/or double-stranded nuclease catalytic activity, i.e., they are catalytically-inactive or nuclease-deficient systems against target polynucleotides. A Class 1 CRISPR-Cas system may be of a subtype, e.g., Type I-A, Type I-B, Type I-C, Type I-D, Type I-E, Type I-F, Type I-U, Type III-A, Type III-B, Type-III-C, Type-III-D, or Type-IV CRISPR-Cas system.

[0191] The Class 1 type I CRISPR Cas system may be used to catalyze RNA-guided integration of mobile genetic elements into a target nucleic acid (e.g., genomic DNA). For example, the systems herein may comprise a complex between Cascade and a transposon protein. At a given distance downstream of a target nucleic acid, a donor nucleic acid (e.g., DNA) may be inserted. The insertion may be in one of two possible orientations. The system may be used to integrate a nucleic acid sequence of desired length. In some examples, the type I CRISPR-Cas system is nuclease-deficient. In some examples, the type I CRISPR-Cas system is Type I-B CRISPR-Cas system.

[0192] A Class 1 type I-A CRISPR-Cas system may comprise Cas7 (Csa2), Cas8a1 (Csx13), Cas8a2 (Csx9), Cas5, Csa5, Cas6a, Cas3″ and/or a Cas3. In an embodiment, the Class I type I-A containing CRISPR-Cas system comprising Cas7 (Csa2), Cas8a1 (Csx13), Cas8a2 (Csx9), Cas5, Csa5, Cas6a, Cas3″ and/or a Cas3 is catalytically active, i.e., possesses single-stranded and/or double-stranded nuclease activity due to the presence of Cas3 and/or Cas3″. A type I-B CRISPR-Cas system may comprise Cas6b, Cas8b (Csh1), Cas7 (Csh2) and/or Cas5. In an embodiment, the Class I type I-B CRISPR-Cas system comprising Cas6b, Cas8b (Csh1), Cas7 (Csh2) and/or Cas5 but lacking Cas 3 and/or Cas3″ is catalytically-inactive, i.e., does not possess single-stranded or double-stranded nuclease activity due to the absence of Cas3 and/or Cas3″. A type I-C CRISPR-Cas system may comprise Cas5d, Cas8c (Csd1), and/or Cas7 (Csd2). A type I-D CRISPR-Cas system may comprise Cas10d (Csc3), Csc2, Csc1, and/or Cas6d. A type I-E CRISPR-Cas system may comprise Cse1 (CasA), Cse2 (CasB), Cas7 (CasC), Cas5 (CasD) and/or Cas6e (CasE). A type I-F CRISPR-Cas system may comprise Cys1, Cys2, Cas7 (Cys3) and/or Cas6f (Csy4). An example type I-F CRISPR-Cas system may include a DNA-targeting complex Cascade (also known as Csy complex) which is encoded by three genes: cas6, cas7, and a natural cas8-cas5 fusion (hereafter referred to simply as cas8). The type I-F CRISPR-Cas system may further comprise a native CRISPR array, comprising four repeat and three spacer sequences, encodes distinct mature CRISPR RNAs (crRNAs), which we also refer to as guide RNAs.

[0193] In an embodiment, Class 1 type I CRISPR-Cas systems naturally lacking Cas3 and/or Cas3″ lack single-stranded and/or double-stranded nuclease activity against a target polynucleotide(s). In an embodiment, engineered Class 1 type I CRISPR-Cas systems comprising Cas3 and/or Cas3″ may optionally comprise or lack single-stranded and/or double-stranded nuclease activity against a target polynucleotide(s). For example, Tables 12 and 13 disclose exemplary Class 1 Type I-B and I-B2 CRISPR systems optionally comprising or lacking catalytic activity, i.e., comprising or lacking Cas3 and/or Cas3″.

[0194] In some examples, a Type I CRISPR-Cas system may comprise one or more: (a) a nucleotide sequence encoding a Cas7 (Csa2) polypeptide, a nucleotide sequence encoding a Cas8a1 (Csx13) polypeptide or a Cas8a2 (Csx9) polypeptide, a nucleotide sequence encoding a Cas5 polypeptide, a nucleotide sequence encoding a Csa5 polypeptide, a nucleotide sequence encoding a Cas6a polypeptide, a nucleotide sequence encoding a Cas3′ polypeptide, and a nucleotide sequence encoding a Cas3″ polypeptide (Type I-A); (b) a nucleotide sequence encoding a Cas6b polypeptide, a nucleotide sequence encoding a Cas8b (Csh1) polypeptide, a nucleotide sequence encoding a Cas7 (Csh2) polypeptide, a nucleotide sequence encoding a Cas5 polypeptide, a nucleotide sequence encoding a Cas3 polypeptide, and a nucleotide sequence encoding a Cas3″ polypeptide (Type I-B); (c) a nucleotide sequence encoding a Cas5d polypeptide, a nucleotide sequence encoding a Cas8c (Csd1) polypeptide, a nucleotide sequence encoding a Cas7 (Csd2) polypeptide and a nucleotide sequence encoding a Cas3 polypeptide (Type I-C); (d) a nucleotide sequence encoding a Cas10d (Csc3) polypeptide, a nucleotide sequence encoding a Csc2 polypeptide, a nucleotide sequence encoding a Csc1 polypeptide, a nucleotide sequence encoding a Cas6d polypeptide, and a nucleotide sequence encoding a Cas3 polypeptide (Type I-D); (e) a nucleotide sequence encoding a Cse1 (CasA) polypeptide, a nucleotide sequence encoding a Cse2 (CasB) polypeptide, a nucleotide sequence encoding a Cas7 (CasC) polypeptide, a nucleotide sequence encoding a Cas5 (CasD) polypeptide, a nucleotide sequence encoding a Cas6e (CasE) polypeptide, and a nucleotide sequence encoding a Cas3 polypeptide (Type I-E); and/or (f) a nucleotide sequence encoding a Cys1 polypeptide, a nucleotide sequence encoding a Cys2 polypeptide, a nucleotide sequence encoding a Cas7 (Cys3) polypeptide and a nucleotide sequence encoding a Cas6f polypeptide, and a nucleotide sequence encoding a Cas3 polypeptide (Type I-F). Accordingly, a type I Cas protein may be one or more of the Cas protein described herein.

[0195] In some embodiments, the system comprises one or more Type I-B Cas proteins. The one or more Type I-B Cas proteins may comprise Cas6b. The one or more Type I-B Cas proteins may comprise Cas8b, e.g., Cas8b1, Cas8b2, and Cas8b3. In some examples, the one or more Type I-B Cas proteins comprises Cas8b3. In some examples, the Type 1-B Cas protein may be one or more of Cas5, Cas6, Cas7, and Cas8. In some examples, the system comprises Cas 5. In some examples, the system comprises Cas 6. In some examples, the system comprises Cas 7. In some examples, the system comprises Cas 5 and Cas6. In some examples, the system comprises Cas 5 and Cas7. In some examples, the system comprises Cas 5 and Cas 8. In some examples, the system comprises Cas 6 and Cas 7. In some examples, the system comprises Cas 6 and Cas 8. In some examples, the system comprises Cas 7 and Cas 8. In some examples, the system comprises Cas 5, Cas6, and Cas7. In some examples, the system comprises Cas 5, Cas6, and Cas8. In some examples, the system comprises Cas 5, Cas7 and Cas8. In some examples, the system comprises Cas 6, Cas7, and Cas8. In some examples, the system comprises Cas 5, Cas6, Cas7, and Cas8.

[0196] In some examples, the system comprises a polynucleotide encoding Cas5. In some examples, the system comprises a polynucleotide encoding Cas6. In some examples, the system comprises a polynucleotide encoding Cas7. In some examples, the system comprises a polynucleotide encoding Cas 5 and a polynucleotide encoding Cas6. In some examples, the system comprises a polynucleotide encoding Cas5 and a polynucleotide encoding Cas7. In some examples, the system comprises a polynucleotide encoding Cas 5 and a polynucleotide encoding Cas8. In some examples, the system comprises a polynucleotide encoding Cas6 and a polynucleotide encoding Cas7. In some examples, the system comprises a polynucleotide encoding Cas6 and a polynucleotide encoding Cas8. In some examples, the system comprises a polynucleotide encoding Cas7 and a polynucleotide encoding Cas 8. In some examples, the system comprises a polynucleotide encoding Cas 5, a polynucleotide encoding Cas6, and a polynucleotide encoding Cas7. In some examples, the system comprises a polynucleotide encoding Cas 5, a polynucleotide encoding Cas6, and a polynucleotide encoding Cas8. In some examples, the system comprises a polynucleotide encoding Cas 5, a polynucleotide encoding Cas7 and a polynucleotide encoding Cas8. In some examples, the system comprises a polynucleotide encoding Cas6, a polynucleotide encoding Cas7, and a polynucleotide encoding Cas8. In some examples, the system comprises a polynucleotide encoding Cas 5, a polynucleotide encoding Cas6, a polynucleotide encoding Cas7, and a polynucleotide encoding Cas8. The Cas proteins herein (e.g., Cas5, Cas6, Cas7, Cas 8) includes the wild type transposases, variants thereof, and functional fragments thereof. In some examples, the system comprises a first polynucleotide encoding a first Cas6 and a second polynucleotide encoding a second Cas6.

[0197] Examples of type I CRISPR components include those described in Makarova et al., Annotation and Classification of CRISPR-Cas Systems, Methods Mol Biol. 2015; 1311: 47-75. Makarova et al. ascribe Cas3 and Cas3″ as providing the single-stranded and double-stranded nuclease and helicase functions of type I CRISPR-Cas components.

[0198] In some examples, the Cas protein may be nuclease-deficient. A nuclease-deficient nuclease may have no nuclease activity. A nuclease-deficient nuclease may have nickase activity.

[0199] In some cases, the Cas protein may be orthologues or homologues of the above mentioned Cas proteins. The terms “ortholog” and “homolog” are well known in the art. By means of further guidance, a “homolog” of a protein as used herein is a protein of the same species which performs the same or a similar function as the protein it is a homologue of. Homologous proteins may but need not be structurally related, or are only partially structurally related. An “ortholog” of a protein as used herein is a protein of a different species which performs the same or a similar function as the protein it is an orthologue of. Orthologous proteins may but need not be structurally related, or are only partially structurally related.

[0200] In some examples, the one or more CRISPR-associated Tn7 transposase polypeptides and/or the one or more Type I-B Cas proteins are from or originated from Anabaena variabilis.

[0201] In some cases, the Cas protein lacks nuclease activity. Such Cas protein may be a naturally existing Cas protein that does not have nuclease activity or the Cas protein may be an engineered Cas protein with mutations or truncations that reduce or eliminate nuclease activity.

[0202] In certain embodiments, the present disclosure includes a transgenic cell in which one or more nucleic acids encoding one or more guide RNAs are provided or introduced operably connected in the cell with a regulatory element comprising a promoter of one or more gene of interest. As used herein, the term “Cas transgenic cell” refers to a cell, such as a eukaryotic cell, in which a Cas gene has been genomically integrated. The nature, type, or origin of the cell are not particularly limiting according to the present invention. Also the way the Cas transgene is introduced in the cell may vary and can be any method as is known in the art. In certain embodiments, the Cas transgenic cell is obtained by introducing the Cas transgene in an isolated cell. In certain other embodiments, the Cas transgenic cell is obtained by isolating cells from a Cas transgenic organism. By means of example, and without limitation, the Cas transgenic cell as referred to herein may be derived from a Cas transgenic eukaryote, such as a Cas knock-in eukaryote. Reference is made to International Patent Publication No. WO 2014/093622 (PCT/US13/74667), incorporated herein by reference. Methods of US Patent Publication Nos. 20120017290 and 20110265198 assigned to Sangamo BioSciences, Inc. directed to targeting the Rosa locus may be modified to utilize the CRISPR Cas system of the present invention. Methods of US Patent Publication No. 20130236946 assigned to Cellectis directed to targeting the Rosa locus may also be modified to utilize the CRISPR Cas system of the present invention. By means of further example reference is made to Platt et. al. (Cell; 159(2):440-455 (2014)), describing a Cas9 knock-in mouse, which is incorporated herein by reference. The Cas transgene can further comprise a Lox-Stop-polyA-Lox(LSL) cassette thereby rendering Cas expression inducible by Cre recombinase. Alternatively, the Cas transgenic cell may be obtained by introducing the Cas transgene in an isolated cell. Delivery systems for transgenes are well known in the art. By means of example, the Cas transgene may be delivered in for instance eukaryotic cell by means of vector (e.g., AAV, adenovirus, lentivirus) and/or particle and/or nanoparticle delivery, as also described herein elsewhere.

[0203] It will be understood by the skilled person that the cell, such as the Cas transgenic cell, as referred to herein may comprise further genomic alterations besides having an integrated Cas gene or the mutations arising from the sequence specific action of Cas when complexed with RNA capable of guiding Cas to a target locus.

[0204] The guide RNA(s) encoding sequences and/or Cas encoding sequences can be functionally or operatively linked to regulatory element(s) and hence the regulatory element(s) drive expression. The promoter(s) can be constitutive promoter(s) and/or conditional promoter(s) and/or inducible promoter(s) and/or tissue specific promoter(s). The promoter can be selected from the group consisting of RNA polymerases, pol I, pol II, pol III, T7, U6, H1, retroviral Rous sarcoma virus (RSV) LTR promoter, the cytomegalovirus (CMV) promoter, the SV40 promoter, the dihydrofolate reductase promoter, the 3-actin promoter, the phosphoglycerol kinase (PGK) promoter, and the EF1α promoter. An advantageous promoter is the promoter is U6.

### Guide Molecules

[0205] The system herein may comprise one or more guide molecules. In some cases the system comprises one guide molecule. In certain cases, the system comprises a plurality of guide molecules. The guide molecule(s) may direct or may be capable of directing the binding of a guide-Cas protein complex to one or more target polynucleotides. For example, the system herein may be used for inserting a donor polynucleotide to one or more desired target sites with the direction of the guide molecule(s).

[0206] The guide molecule(s) may be component(s) of the CRISPR-Cas system herein. As used herein, the term “guide sequence” and “guide molecule” in the context of a CRISPR-Cas system, comprises any polynucleotide sequence having sufficient complementarity with a target nucleic acid sequence to hybridize with the target nucleic acid sequence and direct sequence-specific binding of a nucleic acid-targeting complex to the target nucleic acid sequence. The guide sequences made using the methods disclosed herein may be a full-length guide sequence, a truncated guide sequence, a full-length sgRNA sequence, a truncated sgRNA sequence, or an E+F sgRNA sequence. In some embodiments, the degree of complementarity of the guide sequence to a given target sequence, when optimally aligned using a suitable alignment algorithm, is about or more than about 50%, 60%, 75%, 80%, 85%, 90%, 95%, 97.5%, 99%, or more. In certain example embodiments, the guide molecule comprises a guide sequence that may be designed to have at least one mismatch with the target sequence, such that a RNA duplex formed between the guide sequence and the target sequence. Accordingly, the degree of complementarity is preferably less than 99%. For instance, where the guide sequence consists of 24 nucleotides, the degree of complementarity is more particularly about 96% or less. In particular embodiments, the guide sequence is designed to have a stretch of two or more adjacent mismatching nucleotides, such that the degree of complementarity over the entire guide sequence is further reduced. For instance, where the guide sequence consists of 24 nucleotides, the degree of complementarity is more particularly about 96% or less, more particularly, about 92% or less, more particularly about 88% or less, more particularly about 84% or less, more particularly about 80% or less, more particularly about 76% or less, more particularly about 72% or less, depending on whether the stretch of two or more mismatching nucleotides encompasses 2, 3, 4, 5, 6 or 7 nucleotides, etc. In some embodiments, aside from the stretch of one or more mismatching nucleotides, the degree of complementarity, when optimally aligned using a suitable alignment algorithm, is about or more than about 50%, 60%, 75%, 80%, 85%, 90%, 95%, 97.5%, 99%, or more. Optimal alignment may be determined with the use of any suitable algorithm for aligning sequences, non-limiting example of which include the Smith-Waterman algorithm, the Needleman-Wunsch algorithm, algorithms based on the Burrows-Wheeler Transform (e.g., the Burrows Wheeler Aligner), Clustal W, Clustal X, BLAT, Novoalign (Novocraft Technologies; available at www.novocraft.com), ELAND (Illumina, San Diego, CA), SOAP (available at soap.genomics.org.cn), and Maq (available at maq.sourceforge.net). The ability of a guide sequence (within a nucleic acid-targeting guide RNA) to direct sequence-specific binding of a nucleic acid-targeting complex to a target nucleic acid sequence may be assessed by any suitable assay. For example, the components of a nucleic acid-targeting CRISPR system sufficient to form a nucleic acid-targeting complex, including the guide sequence to be tested, may be provided to a host cell having the corresponding target nucleic acid sequence, such as by transfection with vectors encoding the components of the nucleic acid-targeting complex, followed by an assessment of preferential targeting (e.g., cleavage) within the target nucleic acid sequence, such as by Surveyor assay as described herein. Similarly, cleavage of a target nucleic acid sequence (or a sequence in the vicinity thereof) may be evaluated in a test tube by providing the target nucleic acid sequence, components of a nucleic acid-targeting complex, including the guide sequence to be tested and a control guide sequence different from the test guide sequence, and comparing binding or rate of cleavage at or in the vicinity of the target sequence between the test and control guide sequence reactions. Other assays are possible, and will occur to those skilled in the art. A guide sequence, and hence a nucleic acid-targeting guide RNA may be selected to target any target nucleic acid sequence.

[0207] In certain embodiments, the guide sequence or spacer length of the guide molecules is from 15 to 50 nt. In certain embodiments, the spacer length of the guide RNA is at least 15 nucleotides. In certain embodiments, the spacer length is from 15 to 17 nt, e.g., 15, 16, or 17 nt, from 17 to 20 nt, e.g., 17, 18, 19, or 20 nt, from 20 to 24 nt, e.g., 20, 21, 22, 23, or 24 nt, from 23 to 25 nt, e.g., 23, 24, or 25 nt, from 24 to 27 nt, e.g., 24, 25, 26, or 27 nt, from 27-30 nt, e.g., 27, 28, 29, or 30 nt, from 30-35 nt, e.g., 30, 31, 32, 33, 34, or 35 nt, or 35 nt or longer. In certain example embodiment, the guide sequence is 15, 16, 17, 18, 19, 20, 21, 22, 23, 24, 25, 26, 27, 28, 29, 30, 31, 32, 33, 34, 35, 36, 37, 38, 39 40, 41, 42, 43, 44, 45, 46, 47 48, 49, 50, 51, 52, 53, 54, 55, 56, 57, 58, 59, 60, 61, 62, 63, 64, 65, 66, 67, 68, 69, 70, 71, 72, 73, 74, 75, 76, 77, 78, 79, 80, 81, 82, 83, 84, 85, 86, 87, 88, 89, 90, 91, 92, 93, 94, 95, 96, 97, 98, 99, or 100 nt.

[0208] In some embodiments, the guide sequence is an RNA sequence of between 10 to 50 nt in length, but more particularly of about 20-30 nt advantageously about 20 nt, 23-25 nt or 24 nt. The guide sequence is selected so as to ensure that it hybridizes to the target sequence. This is described more in detail below. Selection can encompass further steps which increase efficacy and specificity.

[0209] In some embodiments, the guide sequence has a canonical length (e.g., about 15-30 nt) is used to hybridize with the target RNA or DNA. In some embodiments, a guide molecule is longer than the canonical length (e.g., >30 nt) is used to hybridize with the target RNA or DNA, such that a region of the guide sequence hybridizes with a region of the RNA or DNA strand outside of the Cas-guide target complex. This can be of interest where additional modifications, such deamination of nucleotides is of interest. In alternative embodiments, it is of interest to maintain the limitation of the canonical guide sequence length.

[0210] In some embodiments, the sequence of the guide molecule (direct repeat and/or spacer) is selected to reduce the degree secondary structure within the guide molecule. In some embodiments, about or less than about 75%, 50%, 40%, 30%, 25%, 20%, 15%, 10%, 5%, 1%, or fewer of the nucleotides of the nucleic acid-targeting guide RNA participate in self-complementary base pairing when optimally folded. Optimal folding may be determined by any suitable polynucleotide folding algorithm. Some programs are based on calculating the minimal Gibbs free energy. An example of one such algorithm is mFold, as described by Zuker and Stiegler (Nucleic Acids Res. 9 (1981), 133-148). Another example folding algorithm is the online webserver RNAfold, developed at Institute for Theoretical Chemistry at the University of Vienna, using the centroid structure prediction algorithm (see e.g., A. R. Gruber et al., 2008, Cell 106(1): 23-24; and PA Carr and GM Church, 2009, Nature Biotechnology 27(12): 1151-62).

[0211] In some embodiments, a guide molecule is designed or selected to modulate intermolecular interactions among guide molecules, such as among stem-loop regions of different guide molecules. It will be appreciated that nucleotides within a guide that base-pair to form a stem-loop are also capable of base-pairing to form an intermolecular duplex with a second guide and that such an intermolecular duplex would not have a secondary structure compatible with CRISPR complex formation. Accordingly, it is useful to select or design DR sequences in order to modulate stem-loop formation and CRISPR complex formation. In some embodiments, about or less than about 75%, 50%, 40%, 30%, 25%, 20%, 15%, 10%, 5%, 1%, or fewer of nucleic acid-targeting guides are in intermolecular duplexes. It will be appreciated that stem-loop variation will often be within limits imposed by DR-CRISPR effector interactions. One way to modulate stem-loop formation or change the equilibrium between stem-loop and intermolecular duplex is to vary nucleotide pairs in the stem of the stem-loop of a DR. For example, in one embodiment, a G-C pair is replaced by an A-U or U-A pair. In another embodiment, an A-U pair is substituted for a G-C or a C-G pair. In another embodiment, a naturally occurring nucleotide is replaced by a nucleotide analog. Another way to modulate stem-loop formation or change the equilibrium between stem-loop and intermolecular duplex is to modify the loop of the stem-loop of a DR. Without be bound by theory, the loop can be viewed as an intervening sequence flanked by two sequences that are complementary to each other. When that intervening sequence is not self-complementary, its effect will be to destabilize intermolecular duplex formation. The same principle applies when guides are multiplexed: while the targeting sequences may differ, it may be advantageous to modify the stem-loop region in the DRs of the different guides. Moreover, when guides are multiplexed, the relative activities of the different guides can be modulated by balancing the activity of each individual guide. In certain embodiments, the equilibrium between intermolecular stem-loops vs. intermolecular duplexes is determined. The determination may be made by physical or biochemical means and can be in the presence or absence of a CRISPR effector.

[0212] In some embodiments, it is of interest to reduce the susceptibility of the guide molecule to RNA cleavage, such as cleavage by a CRISPR system that cleaves RNA. Accordingly, in particular embodiments, the guide molecule is adjusted to avoid cleavage by a CRISPR system or other RNA-cleaving enzymes.

[0213] In certain embodiments, the guide molecule comprises non-naturally occurring nucleic acids and/or non-naturally occurring nucleotides and/or nucleotide analogs, and/or chemically modifications. Preferably, these non-naturally occurring nucleic acids and non-naturally occurring nucleotides are located outside the guide sequence. Non-naturally occurring nucleic acids can include, for example, mixtures of naturally and non-naturally occurring nucleotides. Non-naturally occurring nucleotides and/or nucleotide analogs may be modified at the ribose, phosphate, and/or base moiety. In an embodiment of the invention, a guide nucleic acid comprises ribonucleotides and non-ribonucleotides. In one such embodiment, a guide comprises one or more ribonucleotides and one or more deoxyribonucleotides. In an embodiment of the invention, the guide comprises one or more non-naturally occurring nucleotide or nucleotide analog such as a nucleotide with phosphorothioate linkage, a locked nucleic acid (LNA) nucleotides comprising a methylene bridge between the 2′ and 4′ carbons of the ribose ring, or bridged nucleic acids (BNA). Other examples of modified nucleotides include 2′-O-methyl analogs, 2′-deoxy analogs, or 2′-fluoro analogs. Further examples of modified bases include, but are not limited to, 2-aminopurine, 5-bromo-uridine, pseudouridine, inosine, 7-methylguanosine. Examples of guide RNA chemical modifications include, without limitation, incorporation of 2′-O-methyl (M), 2′-O-methyl 3′phosphorothioate (MS), S-constrained ethyl(cEt), or 2′-O-methyl 3′thioPACE (MSP) at one or more terminal nucleotides. Such chemically modified guides can comprise increased stability and increased activity as compared to unmodified guides, though on-target vs. off-target specificity is not predictable. (See, Hendel, 2015, Nat Biotechnol. 33(9):985-9, doi: 10.1038/nbt.3290, published online 29 Jun. 2015 Ragdarm et al., 0215, PNAS, E7110-E7111; Allerson et al., J. Med. Chem. 2005, 48:901-904; Bramsen et al., Front. Genet., 2012, 3:154; Deng et al., PNAS, 2015, 112:11870-11875; Sharma et al., MedChemComm., 2014, 5:1454-1471; Hendel et al., Nat. Biotechnol. (2015) 33(9): 985-989; Li et al., Nature Biomedical Engineering, 2017, 1, 0066 DOI:10.1038/s41551-017-0066). In some embodiments, the 5′ and/or 3′ end of a guide RNA is modified by a variety of functional moieties including fluorescent dyes, polyethylene glycol, cholesterol, proteins, or detection tags. (See Kelly et al., 2016, J. Biotech. 233:74-83). In certain embodiments, a guide comprises ribonucleotides in a region that binds to a target RNA and one or more deoxyribonucleotides and/or nucleotide analogs in a region that binds to a Cas effector. In an embodiment of the invention, deoxyribonucleotides and/or nucleotide analogs are incorporated in engineered guide structures, such as, without limitation, stem-loop regions, and the seed region. In certain embodiments, at least 1, 2, 3, 4, 5, 6, 7, 8, 9, 10, 11, 12, 13, 14, 15, 16, 17, 18, 19, 20, 21, 22, 23, 24, 25, 26, 27, 28, 29, 30, 35, 40, 45, 50, or 75 nucleotides of a guide is chemically modified. In some embodiments, 3-5 nucleotides at either the 3′ or the 5′ end of a guide is chemically modified. In some embodiments, only minor modifications are introduced in the seed region, such as 2′-F modifications. In some embodiments, 2′-F modification is introduced at the 3′ end of a guide. In certain embodiments, three to five nucleotides at the 5′ and/or the 3′ end of the guide are chemically modified with 2′-O-methyl (M), 2′-O-methyl 3′ phosphorothioate (MS), S-constrained ethyl(cEt), or 2′-O-methyl 3′ thioPACE (MSP). Such modification can enhance genome editing efficiency (see Hendel et al., Nat. Biotechnol. (2015) 33(9): 985-989). In certain embodiments, all of the phosphodiester bonds of a guide are substituted with phosphorothioates (PS) for enhancing levels of gene disruption. In certain embodiments, more than five nucleotides at the 5′ and/or the 3′ end of the guide are chemically modified with 2′-O-Me, 2′-F or S-constrained ethyl(cEt). Such chemically modified guide can mediate enhanced levels of gene disruption (see Ragdarm et al., 0215, PNAS, E7110-E7111). In an embodiment of the invention, a guide is modified to comprise a chemical moiety at its 3′ and/or 5′ end. Such moieties include, but are not limited to amine, azide, alkyne, thio, dibenzocyclooctyne (DBCO), or Rhodamine, peptides, nuclear localization sequence (NLS), peptide nucleic acid (PNA), polyethylene glycol (PEG), triethylene glycol, or tetraethyleneglycol (TEG). In certain embodiment, the chemical moiety is conjugated to the guide by a linker, such as an alkyl chain. In certain embodiments, the chemical moiety is conjugated to the guide by a linker, such as an alkyl chain. In certain embodiments, the chemical moiety of the modified guide can be used to attach the guide to another molecule, such as DNA, RNA, protein, or nanoparticles. Such chemically modified guide can be used to identify or enrich cells generically edited by a CRISPR system (see Lee et al., eLife, 2017, 6:e25312, DOI:10.7554).

[0214] In some embodiments, 3 nucleotides at each of the 3′ and 5′ ends are chemically modified. In a specific embodiment, the modifications comprise 2′-O-methyl or phosphorothioate analogs. In a specific embodiment, 12 nucleotides in the tetraloop and 16 nucleotides in the stem-loop region are replaced with 2′-O-methyl analogs. Such chemical modifications improve in vivo editing and stability (see Finn et al., Cell Reports (2018), 22: 2227-2235). In some embodiments, more than 60 or 70 nucleotides of the guide are chemically modified. In some embodiments, this modification comprises replacement of nucleotides with 2′-O-methyl or 2′-fluoro nucleotide analogs or phosphorothioate (PS) modification of phosphodiester bonds. In some embodiments, the chemical modification comprises 2′-O-methyl or 2′-fluoro modification of guide nucleotides extending outside of the nuclease protein when the CRISPR complex is formed or PS modification of 20 to 30 or more nucleotides of the 3′-terminus of the guide. In a particular embodiment, the chemical modification further comprises 2′-O-methyl analogs at the 5′ end of the guide or 2′-fluoro analogs in the seed and tail regions. Such chemical modifications improve stability to nuclease degradation and maintain or enhance genome-editing activity or efficiency, but modification of all nucleotides may abolish the function of the guide (see Yin et al., Nat. Biotech. (2018), 35(12): 1179-1187). Such chemical modifications may be guided by knowledge of the structure of the CRISPR complex, including knowledge of the limited number of nuclease and RNA 2′-OH interactions (see Yin et al., Nat. Biotech. (2018), 35(12): 1179-1187). In some embodiments, one or more guide RNA nucleotides may be replaced with DNA nucleotides. In some embodiments, up to 2, 4, 6, 8, 10, or 12 RNA nucleotides of the 5′-end tail/seed guide region are replaced with DNA nucleotides. In certain embodiments, the majority of guide RNA nucleotides at the 3′ end are replaced with DNA nucleotides. In particular embodiments, 16 guide RNA nucleotides at the 3′ end are replaced with DNA nucleotides. In particular embodiments, 8 guide RNA nucleotides of the 5′-end tail/seed region and 16 RNA nucleotides at the 3′ end are replaced with DNA nucleotides. In particular embodiments, guide RNA nucleotides that extend outside of the nuclease protein when the CRISPR complex is formed are replaced with DNA nucleotides. Such replacement of multiple RNA nucleotides with DNA nucleotides leads to decreased off-target activity but similar on-target activity compared to an unmodified guide; however, replacement of all RNA nucleotides at the 3′ end may abolish the function of the guide (see Yin et al., Nat. Chem. Biol. (2018) 14, 311-316). Such modifications may be guided by knowledge of the structure of the CRISPR complex, including knowledge of the limited number of nuclease and RNA 2′-OH interactions (see Yin et al., Nat. Chem. Biol. (2018) 14, 311-316).

[0215] In some embodiments, the guide molecule forms a stemloop with a separate non-covalently linked sequence, which can be DNA or RNA. In particular embodiments, the sequences forming the guide are first synthesized using the standard phosphoramidite synthetic protocol (Herdewijn, P., ed., Methods in Molecular Biology Col 288, Oligonucleotide Synthesis: Methods and Applications, Humana Press, New Jersey (2012)). In some embodiments, these sequences can be functionalized to contain an appropriate functional group for ligation using the standard protocol known in the art (Hermanson, G. T., Bioconjugate Techniques, Academic Press (2013)). Examples of functional groups include, but are not limited to, hydroxyl, amine, carboxylic acid, carboxylic acid halide, carboxylic acid active ester, aldehyde, carbonyl, chlorocarbonyl, imidazolylcarbonyl, hydrozide, semicarbazide, thio semicarbazide, thiol, maleimide, haloalkyl, sulfonyl, ally, propargyl, diene, alkyne, and azide. Once this sequence is functionalized, a covalent chemical bond or linkage can be formed between this sequence and the direct repeat sequence. Examples of chemical bonds include, but are not limited to, those based on carbamates, ethers, esters, amides, imines, amidines, aminotrizines, hydrozone, disulfides, thioethers, thioesters, phosphorothioates, phosphorodithioates, sulfonamides, sulfonates, sulfones, sulfoxides, ureas, thioureas, hydrazide, oxime, triazole, photolabile linkages, C—C bond forming groups such as Diels-Alder cyclo-addition pairs or ring-closing metathesis pairs, and Michael reaction pairs.

[0216] In some embodiments, these stem-loop forming sequences can be chemically synthesized. In some embodiments, the chemical synthesis uses automated, solid-phase oligonucleotide synthesis machines with 2′-acetoxyethyl orthoester (2′-ACE) (Scaringe et al., J. Am. Chem. Soc. (1998) 120: 11820-11821; Scaringe, Methods Enzymol. (2000) 317: 3-18) or 2′-thionocarbamate (2′-TC) chemistry (Dellinger et al., J. Am. Chem. Soc. (2011) 133: 11540-11546; Hendel et al., Nat. Biotechnol. (2015) 33:985-989).

[0217] In certain embodiments, the guide molecule comprises (1) a guide sequence capable of hybridizing to a target locus and (2) a tracr mate or direct repeat sequence whereby the direct repeat sequence is located upstream (i.e., 5′) or downstream (i.e. 3′) from the guide sequence. In a particular embodiment, the seed sequence (i.e. the sequence essential critical for recognition and/or hybridization to the sequence at the target locus) of the guide sequence is approximately within the first 10 nucleotides of the guide sequence.

[0218] In a particular embodiment, the guide molecule comprises a guide sequence linked to a direct repeat sequence, wherein the direct repeat sequence comprises one or more stem loops or optimized secondary structures. In particular embodiments, the direct repeat has a minimum length of 16 nts and a single stem loop. In further embodiments the direct repeat has a length longer than 16 nts, preferably more than 17 nts, and has more than one stem loops or optimized secondary structures. In particular embodiments, the guide molecule comprises or consists of the guide sequence linked to all or part of the natural direct repeat sequence. A CRISPR-cas guide molecule comprises (in 3′ to 5′ direction or in 5′ to 3′ direction): a guide sequence a first complimentary stretch (the “repeat”), a loop (which is typically 4 or 5 nucleotides long), a second complimentary stretch (the “anti-repeat” being complimentary to the repeat), and a poly A (often poly U in RNA) tail (terminator). In certain embodiments, the direct repeat sequence retains its natural architecture and forms a single stem loop. In particular embodiments, certain aspects of the guide architecture can be modified, for example by addition, subtraction, or substitution of features, whereas certain other aspects of guide architecture are maintained. Preferred locations for engineered guide molecule modifications, including but not limited to insertions, deletions, and substitutions include guide termini and regions of the guide molecule that are exposed when complexed with the CRISPR-Cas protein and/or target, for example the stemloop of the direct repeat sequence.

[0219] In particular embodiments, the stem comprises at least about 4 bp comprising complementary X and Y sequences, although stems of more, e.g., 5, 6, 7, 8, 9, 10, 11 or 12 or fewer, e.g., 3, 2, base pairs are also contemplated. Thus, for example X2-10 and Y2-10 (wherein X and Y represent any complementary set of nucleotides) may be contemplated. In one aspect, the stem made of the X and Y nucleotides, together with the loop will form a complete hairpin in the overall secondary structure; and, this may be advantageous and the amount of base pairs can be any amount that forms a complete hairpin. In one aspect, any complementary X:Y basepairing sequence (e.g., as to length) is tolerated, so long as the secondary structure of the entire guide molecule is preserved. In one aspect, the loop that connects the stem made of X:Y basepairs can be any sequence of the same length (e.g., 4 or 5 nucleotides) or longer that does not interrupt the overall secondary structure of the guide molecule. In one aspect, the stemloop can further comprise, e.g. an MS2 aptamer. In one aspect, the stem comprises about 5-7 bp comprising complementary X and Y sequences, although stems of more or fewer basepairs are also contemplated. In one aspect, non-Watson Crick basepairing is contemplated, where such pairing otherwise generally preserves the architecture of the stemloop at that position.

[0220] In particular embodiments, the natural hairpin or stemloop structure of the guide molecule is extended or replaced by an extended stemloop. It has been demonstrated that extension of the stem can enhance the assembly of the guide molecule with the CRISPR-Cas protein (Chen et al. Cell. (2013); 155(7): 1479-1491). In particular embodiments, the stem of the stemloop is extended by at least 1, 2, 3, 4, 5 or more complementary basepairs (i.e. corresponding to the addition of 2, 4, 6, 8, 10 or more nucleotides in the guide molecule). In particular embodiments, these are located at the end of the stem, adjacent to the loop of the stemloop.

[0221] In particular embodiments, the susceptibility of the guide molecule to RNases or to decreased expression can be reduced by slight modifications of the sequence of the guide molecule which do not affect its function. For instance, in particular embodiments, premature termination of transcription, such as premature transcription of U6 Pol-III, can be removed by modifying a putative Pol-III terminator (4 consecutive U's) in the guide molecules sequence. Where such sequence modification is required in the stemloop of the guide molecule, it is preferably ensured by a basepair flip.

[0222] In a particular embodiment, the direct repeat may be modified to comprise one or more protein-binding RNA aptamers. In a particular embodiment, one or more aptamers may be included such as part of optimized secondary structure. Such aptamers may be capable of binding a bacteriophage coat protein as detailed further herein.

[0223] In some embodiments, the guide molecule forms a duplex with a target RNA comprising at least one target cytosine residue to be edited. Upon hybridization of the guide RNA molecule to the target RNA, the cytidine deaminase binds to the single strand RNA in the duplex made accessible by the mismatch in the guide sequence and catalyzes deamination of one or more target cytosine residues comprised within the stretch of mismatching nucleotides.

[0224] A guide sequence, and hence a nucleic acid-targeting guide RNA, may be selected to target any target nucleic acid sequence. The target sequence may be mRNA.

[0225] In certain embodiments, the target sequence should be associated with a PAM (protospacer adjacent motif) or PFS (protospacer flanking sequence or site), that is, a short sequence recognized by the CRISPR complex. Depending on the nature of the CRISPR-Cas protein, the target sequence should be selected such that its complementary sequence in the DNA duplex (also referred to herein as the non-target sequence) is upstream or downstream of the PAM.

[0226] Further, engineering of the PAM Interacting (PI) domain may allow programing of PAM specificity, improve target site recognition fidelity, and increase the versatility of the CRISPR-Cas protein, for example as described for Cas9 in Kleinstiver B P et al. Engineered CRISPR-Cas9 nucleases with altered PAM specificities. Nature. 2015 Jul. 23; 523(7561):481-5. doi: 10.1038/nature14592.

[0227] In particular embodiments, the guide is an escorted guide. By “escorted” is meant that the CRISPR-Cas system or complex or guide is delivered to a selected time or place within a cell, so that activity of the CRISPR-Cas system or complex or guide is spatially or temporally controlled. For example, the activity and destination of the 3 CRISPR-Cas system or complex or guide may be controlled by an escort RNA aptamer sequence that has binding affinity for an aptamer ligand, such as a cell surface protein or other localized cellular component. Alternatively, the escort aptamer may for example be responsive to an aptamer effector on or in the cell, such as a transient effector, such as an external energy source that is applied to the cell at a particular time.

[0228] The escorted CRISPR-Cas systems or complexes have a guide molecule with a functional structure designed to improve guide molecule structure, architecture, stability, genetic expression, or any combination thereof. Such a structure can include an aptamer.

[0229] Aptamers are biomolecules that can be designed or selected to bind tightly to other ligands, for example using a technique called systematic evolution of ligands by exponential enrichment (SELEX; Tuerk C, Gold L: “Systematic evolution of ligands by exponential enrichment: RNA ligands to bacteriophage T4 DNA polymerase.” Science 1990, 249:505-510). Nucleic acid aptamers can for example be selected from pools of random-sequence oligonucleotides, with high binding affinities and specificities for a wide range of biomedically relevant targets, suggesting a wide range of therapeutic utilities for aptamers (Keefe, Anthony D., Supriya Pai, and Andrew Ellington. “Aptamers as therapeutics.” Nature Reviews Drug Discovery 9.7 (2010): 537-550). These characteristics also suggest a wide range of uses for aptamers as drug delivery vehicles (Levy-Nissenbaum, Etgar, et al. “Nanotechnology and aptamers: applications in drug delivery.” Trends in biotechnology 26.8 (2008): 442-449; and, Hicke B J, Stephens A W. “Escort aptamers: a delivery service for diagnosis and therapy.” J Clin Invest 2000, 106:923-928.). Aptamers may also be constructed that function as molecular switches, responding to a que by changing properties, such as RNA aptamers that bind fluorophores to mimic the activity of green fluorescent protein (Paige, Jeremy S., Karen Y. Wu, and Samie R. Jaffrey. “RNA mimics of green fluorescent protein.” Science 333.6042 (2011): 642-646). It has also been suggested that aptamers may be used as components of targeted siRNA therapeutic delivery systems, for example targeting cell surface proteins (Zhou, Jiehua, and John J. Rossi. “Aptamer-targeted cell-specific RNA interference.” Silence 1.1 (2010): 4).

[0230] Accordingly, in particular embodiments, the guide molecule is modified, e.g., by one or more aptamer(s) designed to improve guide molecule delivery, including delivery across the cellular membrane, to intracellular compartments, or into the nucleus. Such a structure can include, either in addition to the one or more aptamer(s) or without such one or more aptamer(s), moiety(ies) so as to render the guide molecule deliverable, inducible or responsive to a selected effector. The invention accordingly comprehends a guide molecule that responds to normal or pathological physiological conditions, including without limitation pH, hypoxia, O2 concentration, temperature, protein concentration, enzymatic concentration, lipid structure, light exposure, mechanical disruption (e.g. ultrasound waves), magnetic fields, electric fields, or electromagnetic radiation.

[0231] Light responsiveness of an inducible system may be achieved via the activation and binding of cryptochrome-2 and CIB1. Blue light stimulation induces an activating conformational change in cryptochrome-2, resulting in recruitment of its binding partner CIB1. This binding is fast and reversible, achieving saturation in <15 sec following pulsed stimulation and returning to baseline <15 min after the end of stimulation. These rapid binding kinetics result in a system temporally bound only by the speed of transcription/translation and transcript/protein degradation, rather than uptake and clearance of inducing agents. Crytochrome-2 activation is also highly sensitive, allowing for the use of low light intensity stimulation and mitigating the risks of phototoxicity. Further, in a context such as the intact mammalian brain, variable light intensity may be used to control the size of a stimulated region, allowing for greater precision than vector delivery alone may offer.

[0232] The invention contemplates energy sources such as electromagnetic radiation, sound energy or thermal energy to induce the guide. Advantageously, the electromagnetic radiation is a component of visible light. In a preferred embodiment, the light is a blue light with a wavelength of about 450 to about 495 nm. In an especially preferred embodiment, the wavelength is about 488 nm. In another preferred embodiment, the light stimulation is via pulses. The light power may range from about 0-9 mW/cm2. In a preferred embodiment, a stimulation paradigm of as low as 0.25 sec every 15 sec should result in maximal activation.

[0233] The chemical or energy sensitive guide may undergo a conformational change upon induction by the binding of a chemical source or by the energy allowing it act as a guide and have the CRISPR-Cas system or complex function. The invention can involve applying the chemical source or energy so as to have the guide function and the CRISPR-Cas system or complex function; and optionally further determining that the expression of the genomic locus is altered.

[0234] There are several different designs of this chemical inducible system: 1. ABI-PYL based system inducible by Abscisic Acid (ABA) (see, e.g., stke.sciencemag.org/cgi/content/abstract/sigtrans; 4/164/rs2), 2. FKBP-FRB based system inducible by rapamycin (or related chemicals based on rapamycin) (see, e.g., www.nature.com/nmeth/journal/v2/n6/full/nmeth763.html), 3. GID1-GAI based system inducible by Gibberellin (GA) (see, e.g., www.nature.com/nchembio/journal/v8/n5/full/nchembio.922.html).

[0235] A chemical inducible system can be an estrogen receptor (ER) based system inducible by 4-hydroxytamoxifen (4OHT) (see, e.g., www.pnas.org/content/104/3/1027.abstract). A mutated ligand-binding domain of the estrogen receptor called ERT2 translocates into the nucleus of cells upon binding of 4-hydroxytamoxifen. In further embodiments of the invention any naturally occurring or engineered derivative of any nuclear receptor, thyroid hormone receptor, retinoic acid receptor, estrogen receptor, estrogen-related receptor, glucocorticoid receptor, progesterone receptor, androgen receptor may be used in inducible systems analogous to the ER based inducible system.

[0236] Another inducible system is based on the design using Transient receptor potential (TRP) ion channel based system inducible by energy, heat or radio-wave (see, e.g., www.sciencemag.org/content/336/6081/604). These TRP family proteins respond to different stimuli, including light and heat. When this protein is activated by light or heat, the ion channel will open and allow the entering of ions such as calcium into the plasma membrane. This influx of ions will bind to intracellular ion interacting partners linked to a polypeptide including the guide and the other components of the CRISPR-Cas complex or system, and the binding will induce the change of sub-cellular localization of the polypeptide, leading to the entire polypeptide entering the nucleus of cells. Once inside the nucleus, the guide protein and the other components of the CRISPR-Cas complex will be active and modulating target gene expression in cells.

[0237] While light activation may be an advantageous embodiment, sometimes it may be disadvantageous especially for in vivo applications in which the light may not penetrate the skin or other organs. In this instance, other methods of energy activation are contemplated, in particular, electric field energy and/or ultrasound which have a similar effect.

[0238] Electric field energy is preferably administered substantially as described in the art, using one or more electric pulses of from about 1 Volt/cm to about 10 kVolts/cm under in vivo conditions. Instead of or in addition to the pulses, the electric field may be delivered in a continuous manner. The electric pulse may be applied for between 1 μs and 500 milliseconds, preferably between 1 μs and 100 milliseconds. The electric field may be applied continuously or in a pulsed manner for 5 about minutes.

[0239] As used herein, ‘electric field energy’ is the electrical energy to which a cell is exposed. Preferably, the electric field has a strength of from about 1 Volt/cm to about 10 kVolts/cm or more under in vivo conditions (see WO97/49450).

[0240] As used herein, the term “electric field” includes one or more pulses at variable capacitance and voltage and including exponential and/or square wave and/or modulated wave and/or modulated square wave forms. References to electric fields and electricity should be taken to include reference the presence of an electric potential difference in the environment of a cell. Such an environment may be set up by way of static electricity, alternating current (AC), direct current (DC), etc., as known in the art. The electric field may be uniform, non-uniform or otherwise, and may vary in strength and/or direction in a time dependent manner.

[0241] Single or multiple applications of electric field, as well as single or multiple applications of ultrasound are also possible, in any order and in any combination. The ultrasound and/or the electric field may be delivered as single or multiple continuous applications, or as pulses (pulsatile delivery).

[0242] Electroporation has been used in both in vitro and in vivo procedures to introduce foreign material into living cells. With in vitro applications, a sample of live cells is first mixed with the agent of interest and placed between electrodes such as parallel plates. Then, the electrodes apply an electrical field to the cell/implant mixture. Examples of systems that perform in vitro electroporation include the Electro Cell Manipulator ECM600 product, and the Electro Square Porator T820, both made by the BTX Division of Genetronics, Inc (see U.S. Pat. No. 5,869,326).

[0243] The known electroporation techniques (both in vitro and in vivo) function by applying a brief high voltage pulse to electrodes positioned around the treatment region. The electric field generated between the electrodes causes the cell membranes to temporarily become porous, whereupon molecules of the agent of interest enter the cells. In known electroporation applications, this electric field comprises a single square wave pulse on the order of 1000 V/cm, of about 100 .mu.s duration. Such a pulse may be generated, for example, in known applications of the Electro Square Porator T820.

[0244] Preferably, the electric field has a strength of from about 1 V/cm to about 10 kV/cm under in vitro conditions. Thus, the electric field may have a strength of 1 V/cm, 2 V/cm, 3 V/cm, 4 V/cm, 5 V/cm, 6 V/cm, 7 V/cm, 8 V/cm, 9 V/cm, 10 V/cm, 20 V/cm, 50 V/cm, 100 V/cm, 200 V/cm, 300 V/cm, 400 V/cm, 500 V/cm, 600 V/cm, 700 V/cm, 800 V/cm, 900 V/cm, 1 kV/cm, 2 kV/cm, 5 kV/cm, 10 kV/cm, 20 kV/cm, 50 kV/cm or more. More preferably from about 0.5 kV/cm to about 4.0 kV/cm under in vitro conditions. Preferably the electric field has a strength of from about 1 V/cm to about 10 kV/cm under in vivo conditions. However, the electric field strengths may be lowered where the number of pulses delivered to the target site are increased. Thus, pulsatile delivery of electric fields at lower field strengths is envisaged.

[0245] Preferably the application of the electric field is in the form of multiple pulses such as double pulses of the same strength and capacitance or sequential pulses of varying strength and/or capacitance. As used herein, the term “pulse” includes one or more electric pulses at variable capacitance and voltage and including exponential and/or square wave and/or modulated wave/square wave forms.

[0246] Preferably the electric pulse is delivered as a waveform selected from an exponential wave form, a square wave form, a modulated wave form and a modulated square wave form.

[0247] A preferred embodiment employs direct current at low voltage. Thus, Applicants disclose the use of an electric field which is applied to the cell, tissue or tissue mass at a field strength of between 1V/cm and 20V/cm, for a period of 100 milliseconds or more, preferably 15 minutes or more.

[0248] Ultrasound is advantageously administered at a power level of from about 0.05 W/cm2 to about 100 W/cm2. Diagnostic or therapeutic ultrasound may be used, or combinations thereof.

[0249] As used herein, the term “ultrasound” refers to a form of energy which consists of mechanical vibrations the frequencies of which are so high they are above the range of human hearing. Lower frequency limit of the ultrasonic spectrum may generally be taken as about 20 kHz. Most diagnostic applications of ultrasound employ frequencies in the range 1 and 15 MHz’ (From Ultrasonics in Clinical Diagnosis, P. N. T. Wells, ed., 2nd. Edition, Publ. Churchill Livingstone [Edinburgh, London & NY, 1977]).

[0250] Ultrasound has been used in both diagnostic and therapeutic applications. When used as a diagnostic tool (“diagnostic ultrasound”), ultrasound is typically used in an energy density range of up to about 100 mW/cm2 (FDA recommendation), although energy densities of up to 750 mW/cm2 have been used. In physiotherapy, ultrasound is typically used as an energy source in a range up to about 3 to 4 W/cm2 (WHO recommendation). In other therapeutic applications, higher intensities of ultrasound may be employed, for example, HIFU at 100 W/cm up to 1 kW/cm2 (or even higher) for short periods of time. The term “ultrasound” as used in this specification is intended to encompass diagnostic, therapeutic and focused ultrasound.

[0251] Focused ultrasound (FUS) allows thermal energy to be delivered without an invasive probe (see Morocz et al 1998 Journal of Magnetic Resonance Imaging Vol. 8, No. 1, pp. 136-142. Another form of focused ultrasound is high intensity focused ultrasound (HIFU) which is reviewed by Moussatov et al in Ultrasonics (1998) Vol. 36, No. 8, pp. 893-900 and TranHuuHue et al in Acustica (1997) Vol. 83, No. 6, pp. 1103-1106.

[0252] Preferably, a combination of diagnostic ultrasound and a therapeutic ultrasound is employed. This combination is not intended to be limiting, however, and the skilled reader will appreciate that any variety of combinations of ultrasound may be used. Additionally, the energy density, frequency of ultrasound, and period of exposure may be varied.

[0253] Preferably the exposure to an ultrasound energy source is at a power density of from about 0.05 to about 100 Wcm-2. Even more preferably, the exposure to an ultrasound energy source is at a power density of from about 1 to about 15 Wcm-2.

[0254] Preferably the exposure to an ultrasound energy source is at a frequency of from about 0.015 to about 10.0 MHz. More preferably the exposure to an ultrasound energy source is at a frequency of from about 0.02 to about 5.0 MHz or about 6.0 MHz. Most preferably, the ultrasound is applied at a frequency of 3 MHz.

[0255] Preferably the exposure is for periods of from about 10 milliseconds to about 60 minutes. Preferably the exposure is for periods of from about 1 second to about 5 minutes. More preferably, the ultrasound is applied for about 2 minutes. Depending on the particular target cell to be disrupted, however, the exposure may be for a longer duration, for example, for 15 minutes.

[0256] Advantageously, the target tissue is exposed to an ultrasound energy source at an acoustic power density of from about 0.05 Wcm-2 to about 10 Wcm-2 with a frequency ranging from about 0.015 to about 10 MHz (see WO 98/52609). However, alternatives are also possible, for example, exposure to an ultrasound energy source at an acoustic power density of above 100 Wcm-2, but for reduced periods of time, for example, 1000 Wcm-2 for periods in the millisecond range or less.

[0257] Preferably the application of the ultrasound is in the form of multiple pulses; thus, both continuous wave and pulsed wave (pulsatile delivery of ultrasound) may be employed in any combination. For example, continuous wave ultrasound may be applied, followed by pulsed wave ultrasound, or vice versa. This may be repeated any number of times, in any order and combination. The pulsed wave ultrasound may be applied against a background of continuous wave ultrasound, and any number of pulses may be used in any number of groups.

[0258] Preferably, the ultrasound may comprise pulsed wave ultrasound. In a highly preferred embodiment, the ultrasound is applied at a power density of 0.7 Wcm-2 or 1.25 Wcm-2 as a continuous wave. Higher power densities may be employed if pulsed wave ultrasound is used.

[0259] Use of ultrasound is advantageous as, like light, it may be focused accurately on a target. Moreover, ultrasound is advantageous as it may be focused more deeply into tissues unlike light. It is therefore better suited to whole-tissue penetration (such as but not limited to a lobe of the liver) or whole organ (such as but not limited to the entire liver or an entire muscle, such as the heart) therapy. Another important advantage is that ultrasound is a non-invasive stimulus which is used in a wide variety of diagnostic and therapeutic applications. By way of example, ultrasound is well known in medical imaging techniques and, additionally, in orthopedic therapy. Furthermore, instruments suitable for the application of ultrasound to a subject vertebrate are widely available and their use is well known in the art.

[0260] In particular embodiments, the guide molecule is modified by a secondary structure to increase the specificity of the CRISPR-Cas system and the secondary structure can protect against exonuclease activity and allow for 5′ additions to the guide sequence also referred to herein as a protected guide molecule.

[0261] In one aspect, the invention provides for hybridizing a “protector RNA” to a sequence of the guide molecule, wherein the “protector RNA” is an RNA strand complementary to the 3′ end of the guide molecule to thereby generate a partially double-stranded guide RNA. In an embodiment of the invention, protecting mismatched bases (i.e. the bases of the guide molecule which do not form part of the guide sequence) with a perfectly complementary protector sequence decreases the likelihood of target RNA binding to the mismatched basepairs at the 3′ end. In particular embodiments of the invention, additional sequences comprising an extended length may also be present within the guide molecule such that the guide comprises a protector sequence within the guide molecule. This “protector sequence” ensures that the guide molecule comprises a “protected sequence” in addition to an “exposed sequence” (comprising the part of the guide sequence hybridizing to the target sequence). In particular embodiments, the guide molecule is modified by the presence of the protector guide to comprise a secondary structure such as a hairpin. Advantageously there are three or four to thirty or more, e.g., about 10 or more, contiguous base pairs having complementarity to the protected sequence, the guide sequence or both. It is advantageous that the protected portion does not impede thermodynamics of the CRISPR-Cas system interacting with its target. By providing such an extension including a partially double stranded guide molecule, the guide molecule is considered protected and results in improved specific binding of the CRISPR-Cas complex, while maintaining specific activity.

[0262] In particular embodiments, use is made of a truncated guide (tru-guide), i.e. a guide molecule which comprises a guide sequence which is truncated in length with respect to the canonical guide sequence length. As described by Nowak et al. (Nucleic Acids Res (2016) 44 (20): 9555-9564), such guides may allow catalytically active CRISPR-Cas enzyme to bind its target without cleaving the target RNA. In particular embodiments, a truncated guide is used which allows the binding of the target but retains only nickase activity of the CRISPR-Cas enzyme.

### Additional CRISPR-Cas Development and Use Considerations

[0263] The present invention may be further illustrated and extended based on aspects of CRISPR-Cas9 development and use as set forth in the following articles and particularly as relates to delivery of a CRISPR protein complex and uses of an RNA guided endonuclease in cells and organisms:
[0264] Multiplex genome engineering using CRISPR/Cas systems. Cong, L., Ran, F. A., Cox, D., Lin, S., Barretto, R., Habib, N., Hsu, P. D., Wu, X., Jiang, W., Marraffini, L. A., & Zhang, F. Science February 15; 339(6121):819-23 (2013);
[0265] RNA-guided editing of bacterial genomes using CRISPR-Cas systems. Jiang W., Bikard D., Cox D., Zhang F, Marraffini L A. Nat Biotechnol Mar; 31(3):233-9 (2013);
[0266] One-Step Generation of Mice Carrying Mutations in Multiple Genes by CRISPR/Cas-Mediated Genome Engineering. Wang H., Yang H., Shivalila C S., Dawlaty M M., Cheng A W., Zhang F., Jaenisch R. Cell May 9; 153(4):910-8 (2013);
[0267] Optical control of mammalian endogenous transcription and epigenetic states. Konermann S, Brigham M D, Trevino A E, Hsu P D, Heidenreich M, Cong L, Platt R J, Scott D A, Church G M, Zhang F. Nature. August 22; 500(7463):472-6. doi: 10.1038/Nature12466. Epub 2013 Aug. 23 (2013);
[0268] Double Nicking by RNA-Guided CRISPR Cas9 for Enhanced Genome Editing Specificity. Ran, F A., Hsu, P D., Lin, C Y., Gootenberg, J S., Konermann, S., Trevino, AE., Scott, DA., Inoue, A., Matoba, S., Zhang, Y., & Zhang, F. Cell August 28. pii: S0092-8674(13)01015-5 (2013-A);
[0269] DNA targeting specificity of RNA-guided Cas9 nucleases. Hsu, P., Scott, D., Weinstein, J., Ran, FA., Konermann, S., Agarwala, V., Li, Y., Fine, E., Wu, X., Shalem, O., Cradick, TJ., Marraffini, LA., Bao, G., & Zhang, F. Nat Biotechnol doi:10.1038/nbt.2647 (2013);
[0270] Genome engineering using the CRISPR-Cas9 system. Ran, FA., Hsu, PD., Wright, J., Agarwala, V., Scott, DA., Zhang, F. Nature Protocols November; 8(11):2281-308 (2013-B);
[0271] Genome-Scale CRISPR-Cas9 Knockout Screening in Human Cells. Shalem, O., Sanjana, NE., Hartenian, E., Shi, X., Scott, DA., Mikkelson, T., Heckl, D., Ebert, BL., Root, DE., Doench, JG., Zhang, F. Science December 12. (2013). [Epub ahead of print];
[0272] Crystal structure of cas9 in complex with guide RNA and target DNA. Nishimasu, H., Ran, FA., Hsu, PD., Konermann, S., Shehata, SI., Dohmae, N., Ishitani, R., Zhang, F., Nureki, O. Cell February 27, 156(5):935-49 (2014);
[0273] Genome-wide binding of the CRISPR endonuclease Cas9 in mammalian cells. Wu X., Scott D A., Kriz A J., Chiu A C., Hsu P D., Dadon D B., Cheng A W., Trevino A E., Konermann S., Chen S., Jaenisch R., Zhang F., Sharp P A. Nat Biotechnol. April 20. doi: 10.1038/nbt.2889 (2014);
[0274] CRISPR-Cas9 Knockin Mice for Genome Editing and Cancer Modeling. Platt R J, Chen S, Zhou Y, Yim M J, Swiech L, Kempton H R, Dahlman J E, Parnas O, Eisenhaure T M, Jovanovic M, Graham D B, Jhunjhunwala S, Heidenreich M, Xavier R J, Langer R, Anderson D G, Hacohen N, Regev A, Feng G, Sharp P A, Zhang F. Cell 159(2): 440-455 DOI: 10.1016/j.cell.2014.09.014(2014);
[0275] Development and Applications of CRISPR-Cas9 for Genome Engineering, Hsu P D, Lander E S, Zhang F., Cell. June 5; 157(6):1262-78 (2014).
[0276] Genetic screens in human cells using the CRISPR/Cas9 system, Wang T, Wei J J, Sabatini D M, Lander E S., Science. January 3; 343(6166): 80-84. doi:10.1126/science.1246981 (2014);
[0277] Rational design of highly active sgRNAs for CRISPR-Cas9-mediated gene inactivation, Doench J G, Hartenian E, Graham D B, Tothova Z, Hegde M, Smith I, Sullender M, Ebert B L, Xavier R J, Root D E., (published online 3 Sep. 2014) Nat Biotechnol. December; 32(12):1262-7 (2014);
[0278] In vivo interrogation of gene function in the mammalian brain using CRISPR-Cas9, Swiech L, Heidenreich M, Banerjee A, Habib N, Li Y, Trombetta J, Sur M, Zhang F., (published online 19 Oct. 2014) Nat Biotechnol. January; 33(1):102-6 (2015);
[0279] Genome-scale transcriptional activation by an engineered CRISPR-Cas9 complex, Konermann S, Brigham M D, Trevino A E, Joung J, Abudayyeh 00, Barcena C, Hsu P D, Habib N, Gootenberg J S, Nishimasu H, Nureki O, Zhang F., Nature. January 29; 517(7536):583-8 (2015).
[0280] A split-Cas9 architecture for inducible genome editing and transcription modulation, Zetsche B, Volz S E, Zhang F., (published online 2 Feb. 2015) Nat Biotechnol. February; 33(2):139-42 (2015);
[0281] Genome-wide CRISPR Screen in a Mouse Model of Tumor Growth and Metastasis, Chen S, Sanjana N E, Zheng K, Shalem O, Lee K, Shi X, Scott D A, Song J, Pan J Q, Weissleder R, Lee H, Zhang F, Sharp P A. Cell 160, 1246-1260, Mar. 12, 2015 (multiplex screen in mouse), and
[0282] In vivo genome editing using Staphylococcus aureus Cas9, Ran F A, Cong L, Yan W X, Scott D A, Gootenberg J S, Kriz A J, Zetsche B, Shalem O, Wu X, Makarova K S, Koonin E V, Sharp P A, Zhang F., (published online 1 Apr. 2015), Nature. April 9; 520(7546):186-91 (2015).
[0283] Shalem et al., “High-throughput functional genomics using CRISPR-Cas9,” Nature Reviews Genetics 16, 299-311 (May 2015).
[0284] Xu et al., “Sequence determinants of improved CRISPR sgRNA design,” Genome Research 25, 1147-1157 (August 2015).
[0285] Parnas et al., “A Genome-wide CRISPR Screen in Primary Immune Cells to Dissect Regulatory Networks,” Cell 162, 675-686 (Jul. 30, 2015).
[0286] Ramanan et al., CRISPR/Cas9 cleavage of viral DNA efficiently suppresses hepatitis B virus,” Scientific Reports 5:10833. doi: 10.1038/srep10833 (Jun. 2, 2015)
[0287] Nishimasu et al., Crystal Structure of Staphylococcus aureus Cas9,” Cell 162, 1113-1126 (Aug. 27, 2015)
[0288] BCL11A enhancer dissection by Cas9-mediated in situ saturating mutagenesis, Canver et al., Nature 527(7577):192-7 (Nov. 12, 2015) doi: 10.1038/nature15521. Epub 2015 Sep. 16.
[0289] Cpf1 Is a Single RNA-Guided Endonuclease of a Class 2 CRISPR-Cas System, Zetsche et al., Cell 163, 759-71 (Sep. 25, 2015).
[0290] Discovery and Functional Characterization of Diverse Class 2 CRISPR-Cas Systems, Shmakov et al., Molecular Cell, 60(3), 385-397 doi: 10.1016/j.molcel.2015.10.008 Epub Oct. 22, 2015.
[0291] Rationally engineered Cas9 nucleases with improved specificity, Slaymaker et al., Science 2016 Jan. 1 351(6268): 84-88 doi: 10.1126/science.aad5227. Epub 2015 Dec. 1. [Epub ahead of print].
[0292] Gao et al, “Engineered Cpf1 Enzymes with Altered PAM Specificities,” bioRxiv 091611; doi: http://dx.doi.org/10.1101/091611 (Dec. 4, 2016)
   each of which is incorporated herein by reference, may be considered in the practice of the instant invention, and discussed briefly below:
[0293] Cong et al. engineered type II CRISPR-Cas systems for use in eukaryotic cells based on both Streptococcus thermophilus Cas9 and also Streptococcus pyogenes Cas9 and demonstrated that Cas9 nucleases can be directed by short RNAs to induce precise cleavage of DNA in human and mouse cells. Their study further showed that Cas9 as converted into a nicking enzyme can be used to facilitate homology-directed repair in eukaryotic cells with minimal mutagenic activity. Additionally, their study demonstrated that multiple guide sequences can be encoded into a single CRISPR array to enable simultaneous editing of several at endogenous genomic loci sites within the mammalian genome, demonstrating easy programmability and wide applicability of the RNA-guided nuclease technology. This ability to use RNA to program sequence specific DNA cleavage in cells defined a new class of genome engineering tools. These studies further showed that other CRISPR loci are likely to be transplantable into mammalian cells and can also mediate mammalian genome cleavage. Importantly, it can be envisaged that several aspects of the CRISPR-Cas system can be further improved to increase its efficiency and versatility.
[0294] Jiang et al. used the clustered, regularly interspaced, short palindromic repeats (CRISPR)-associated Cas9 endonuclease complexed with dual-RNAs to introduce precise mutations in the genomes of Streptococcus pneumoniae and Escherichia coli. The approach relied on dual-RNA:Cas9-directed cleavage at the targeted genomic site to kill unmutated cells and circumvents the need for selectable markers or counter-selection systems. The study reported reprogramming dual-RNA:Cas9 specificity by changing the sequence of short CRISPR RNA (crRNA) to make single- and multinucleotide changes carried on editing templates. The study showed that simultaneous use of two crRNAs enabled multiplex mutagenesis. Furthermore, when the approach was used in combination with recombineering, in S. pneumoniae, nearly 100% of cells that were recovered using the described approach contained the desired mutation, and in E. coli, 65% that were recovered contained the mutation.
[0295] Wang et al. (2013) used the CRISPR-Cas system for the one-step generation of mice carrying mutations in multiple genes which were traditionally generated in multiple steps by sequential recombination in embryonic stem cells and/or time-consuming intercrossing of mice with a single mutation. The CRISPR-Cas system will greatly accelerate the in vivo study of functionally redundant genes and of epistatic gene interactions.
[0296] Konermann et al. (2013) addressed the need in the art for versatile and robust technologies that enable optical and chemical modulation of DNA-binding domains based CRISPR Cas9 enzyme and also Transcriptional Activator Like Effectors
[0297] Ran et al. (2013-A) described an approach that combined a Cas9 nickase mutant with paired guide RNAs to introduce targeted double-strand breaks. This addresses the issue of the Cas9 nuclease from the microbial CRISPR-Cas system being targeted to specific genomic loci by a guide sequence, which can tolerate certain mismatches to the DNA target and thereby promote undesired off-target mutagenesis. Because individual nicks in the genome are repaired with high fidelity, simultaneous nicking via appropriately offset guide RNAs is required for double-stranded breaks and extends the number of specifically recognized bases for target cleavage. The authors demonstrated that using paired nicking can reduce off-target activity by 50- to 1,500-fold in cell lines and to facilitate gene knockout in mouse zygotes without sacrificing on-target cleavage efficiency. This versatile strategy enables a wide variety of genome editing applications that require high specificity.
[0298] Hsu et al. (2013) characterized SpCas9 targeting specificity in human cells to inform the selection of target sites and avoid off-target effects. The study evaluated >700 guide RNA variants and SpCas9-induced indel mutation levels at >100 predicted genomic off-target loci in 293T and 293FT cells. The authors that SpCas9 tolerates mismatches between guide RNA and target DNA at different positions in a sequence-dependent manner, sensitive to the number, position and distribution of mismatches. The authors further showed that SpCas9-mediated cleavage is unaffected by DNA methylation and that the dosage of SpCas9 and gRNA can be titrated to minimize off-target modification. Additionally, to facilitate mammalian genome engineering applications, the authors reported providing a web-based software tool to guide the selection and validation of target sequences as well as off-target analyses.
[0299] Ran et al. (2013-B) described a set of tools for Cas9-mediated genome editing via non-homologous end joining (NHEJ) or homology-directed repair (HDR) in mammalian cells, as well as generation of modified cell lines for downstream functional studies. To minimize off-target cleavage, the authors further described a double-nicking strategy using the Cas9 nickase mutant with paired guide RNAs. The protocol provided by the authors experimentally derived guidelines for the selection of target sites, evaluation of cleavage efficiency and analysis of off-target activity. The studies showed that beginning with target design, gene modifications can be achieved within as little as 1-2 weeks, and modified clonal cell lines can be derived within 2-3 weeks.
[0300] Shalem et al. described a new way to interrogate gene function on a genome-wide scale. Their studies showed that delivery of a genome-scale CRISPR-Cas9 knockout (GeCKO) library targeted 18,080 genes with 64,751 unique guide sequences enabled both negative and positive selection screening in human cells. First, the authors showed use of the GeCKO library to identify genes essential for cell viability in cancer and pluripotent stem cells. Next, in a melanoma model, the authors screened for genes whose loss is involved in resistance to vemurafenib, a therapeutic that inhibits mutant protein kinase BRAF. Their studies showed that the highest-ranking candidates included previously validated genes NF1 and MED12 as well as novel hits NF2, CUL3, TADA2B, and TADA1. The authors observed a high level of consistency between independent guide RNAs targeting the same gene and a high rate of hit confirmation, and thus demonstrated the promise of genome-scale screening with Cas9.
[0301] Nishimasu et al. reported the crystal structure of Streptococcus pyogenes Cas9 in complex with sgRNA and its target DNA at 2.5 A° resolution. The structure revealed a bilobed architecture composed of target recognition and nuclease lobes, accommodating the sgRNA:DNA heteroduplex in a positively charged groove at their interface. Whereas the recognition lobe is essential for binding sgRNA and DNA, the nuclease lobe contains the HNH and RuvC nuclease domains, which are properly positioned for cleavage of the complementary and non-complementary strands of the target DNA, respectively. The nuclease lobe also contains a carboxyl-terminal domain responsible for the interaction with the protospacer adjacent motif (PAM). This high-resolution structure and accompanying functional analyses have revealed the molecular mechanism of RNA-guided DNA targeting by Cas9, thus paving the way for the rational design of new, versatile genome-editing technologies.
[0302] Wu et al. mapped genome-wide binding sites of a catalytically inactive Cas9 (dCas9) from Streptococcus pyogenes loaded with single guide RNAs (sgRNAs) in mouse embryonic stem cells (mESCs). The authors showed that each of the four sgRNAs tested targets dCas9 to between tens and thousands of genomic sites, frequently characterized by a 5-nucleotide seed region in the sgRNA and an NGG protospacer adjacent motif (PAM). Chromatin inaccessibility decreases dCas9 binding to other sites with matching seed sequences; thus 70% of off-target sites are associated with genes. The authors showed that targeted sequencing of 295 dCas9 binding sites in mESCs transfected with catalytically active Cas9 identified only one site mutated above background levels. The authors proposed a two-state model for Cas9 binding and cleavage, in which a seed match triggers binding but extensive pairing with target DNA is required for cleavage.
[0303] Platt et al. established a Cre-dependent Cas9 knockin mouse. The authors demonstrated in vivo as well as ex vivo genome editing using adeno-associated virus (AAV)-, lentivirus-, or particle-mediated delivery of guide RNA in neurons, immune cells, and endothelial cells.
[0304] Hsu et al. (2014) is a review article that discusses generally CRISPR-Cas9 history from yogurt to genome editing, including genetic screening of cells.
[0305] Wang et al. (2014) relates to a pooled, loss-of-function genetic screening approach suitable for both positive and negative selection that uses a genome-scale lentiviral single guide RNA (sgRNA) library.
[0306] Doench et al. created a pool of sgRNAs, tiling across all possible target sites of a panel of six endogenous mouse and three endogenous human genes and quantitatively assessed their ability to produce null alleles of their target gene by antibody staining and flow cytometry. The authors showed that optimization of the PAM improved activity and also provided an on-line tool for designing sgRNAs.
[0307] Swiech et al. demonstrate that AAV-mediated SpCas9 genome editing can enable reverse genetic studies of gene function in the brain.
[0308] Konermann et al. (2015) discusses the ability to attach multiple effector domains, e.g., transcriptional activator, functional and epigenomic regulators at appropriate positions on the guide such as stem or tetraloop with and without linkers.
[0309] Zetsche et al. demonstrates that the Cas9 enzyme can be split into two and hence the assembly of Cas9 for activation can be controlled.
[0310] Chen et al. relates to multiplex screening by demonstrating that a genome-wide in vivo CRISPR-Cas9 screen in mice reveals genes regulating lung metastasis.
[0311] Ran et al. (2015) relates to SaCas9 and its ability to edit genomes and demonstrates that one cannot extrapolate from biochemical assays.
[0312] Shalem et al. (2015) described ways in which catalytically inactive Cas9 (dCas9) fusions are used to synthetically repress (CRISPRi) or activate (CRISPRa) expression, showing. advances using Cas9 for genome-scale screens, including arrayed and pooled screens, knockout approaches that inactivate genomic loci and strategies that modulate transcriptional activity.
[0313] Xu et al. (2015) assessed the DNA sequence features that contribute to single guide RNA (sgRNA) efficiency in CRISPR-based screens. The authors explored efficiency of CRISPR/Cas9 knockout and nucleotide preference at the cleavage site. The authors also found that the sequence preference for CRISPRi/a is substantially different from that for CRISPR/Cas9 knockout.
[0314] Parnas et al. (2015) introduced genome-wide pooled CRISPR-Cas9 libraries into dendritic cells (DCs) to identify genes that control the induction of tumor necrosis factor (Tnf) by bacterial lipopolysaccharide (LPS). Known regulators of Tlr4 signaling and previously unknown candidates were identified and classified into three functional modules with distinct effects on the canonical responses to LPS.
[0315] Ramanan et al (2015) demonstrated cleavage of viral episomal DNA (cccDNA) in infected cells. The HBV genome exists in the nuclei of infected hepatocytes as a 3.2 kb double-stranded episomal DNA species called covalently closed circular DNA (cccDNA), which is a key component in the HBV life cycle whose replication is not inhibited by current therapies. The authors showed that sgRNAs specifically targeting highly conserved regions of HBV robustly suppresses viral replication and depleted cccDNA.
[0316] Nishimasu et al. (2015) reported the crystal structures of SaCas9 in complex with a single guide RNA (sgRNA) and its double-stranded DNA targets, containing the 5′-TTGAAT-3′ PAM and the 5′-TTGGGT-3′ PAM. A structural comparison of SaCas9 with SpCas9 highlighted both structural conservation and divergence, explaining their distinct PAM specificities and orthologous sgRNA recognition.
[0317] Canver et al. (2015) demonstrated a CRISPR-Cas9-based functional investigation of non-coding genomic elements. The authors we developed pooled CRISPR-Cas9 guide RNA libraries to perform in situ saturating mutagenesis of the human and mouse BCL11A enhancers which revealed critical features of the enhancers.
[0318] Zetsche et al. (2015) reported characterization of Cpf1, a class 2 CRISPR nuclease from Francisella novicida U112 having features distinct from Cas9. Cpf1 is a single RNA-guided endonuclease lacking tracrRNA, utilizes a T-rich protospacer-adjacent motif, and cleaves DNA via a staggered DNA double-stranded break.
[0319] Shmakov et al. (2015) reported three distinct Class 2 CRISPR-Cas systems. Two system CRISPR enzymes (C2c1 and C2c3) contain RuvC-like endonuclease domains distantly related to Cpf1. Unlike Cpf1, C2c1 depends on both crRNA and tracrRNA for DNA cleavage. The third enzyme (C2c2) contains two predicted HEPN RNase domains and is tracrRNA independent.
[0320] Slaymaker et al (2016) reported the use of structure-guided protein engineering to improve the specificity of Streptococcus pyogenes Cas9 (SpCas9). The authors developed “enhanced specificity” SpCas9 (eSpCas9) variants which maintained robust on-target cleavage with reduced off-target effects.

[0321] The methods and tools provided herein are exemplified for certain Cas effectors. Further nucleases with similar properties can be identified using methods described in the art (Shmakov et al. 2015, 60:385-397; Abudayeh et al. 2016, Science, 5; 353(6299)). In particular embodiments, such methods for identifying novel CRISPR effector proteins may comprise the steps of selecting sequences from the database encoding a seed which identifies the presence of a CRISPR Cas locus, identifying loci located within 10 kb of the seed comprising Open Reading Frames (ORFs) in the selected sequences, selecting therefrom loci comprising ORFs of which only a single ORF encodes a novel CRISPR effector having greater than 700 amino acids and no more than 90% homology to a known CRISPR effector. In particular embodiments, the seed is a protein that is common to the CRISPR-Cas system, such as Cas1. In further embodiments, the CRISPR array is used as a seed to identify new effector proteins.

[0322] Also, “Dimeric CRISPR RNA-guided FokI nucleases for highly specific genome editing”, Shengdar Q. Tsai, Nicolas Wyvekens, Cyd Khayter, Jennifer A. Foden, Vishal Thapar, Deepak Reyon, Mathew J. Goodwin, Martin J. Aryee, J. Keith Joung Nature Biotechnology 32(6): 569-77 (2014), relates to dimeric RNA-guided FokI Nucleases that recognize extended sequences and can edit endogenous genes with high efficiencies in human cells.

[0323] With respect to general information on CRISPR-Cas Systems, components thereof, and delivery of such components, including methods, materials, delivery vehicles, vectors, particles, AAV, and making and using thereof, including as to amounts and formulations, all useful in the practice of the instant invention, reference is made to: U.S. Pat. Nos. 8,697,359, 8,771,945, 8,795,965, 8,865,406, 8,871,445, 8,889,356, 8,889,418, 8,895,308, 8,906,616, 8,932,814, 8,945,839, 8,993,233 and 8,999,641; US Patent Publications US 2014-0310830 (U.S. application Ser. No. 14/105,031), US 2014-0287938 A1 (U.S. application Ser. No. 14/213,991), US 2014-0273234 A1 (U.S. application Ser. No. 14/293,674), US2014-0273232 A1 (U.S. application Ser. No. 14/290,575), US 2014-027323 A1 (U.S. application Ser. No. 14/259,420), US 2014-0256046 A1 (U.S. application Ser. No. 14/226,274), US 2014-0248702 A1 (U.S. application Ser. No. 14/258,458), US 2014-0242700 A1 (U.S. application Ser. No. 14/222,930), US 2014-0242699 A1 (U.S. application Ser. No. 14/183,512), US 2014-0242664 A1 (U.S. application Ser. No. 14/104,990), US 2014-0234972 A1 (U.S. application Ser. No. 14/183,471), US 2014-0227787 A1 (U.S. application Ser. No. 14/256,912), US 2014-0189896 A1 (U.S. application Ser. No. 14/105,035), US 2014-0186958 A1 (U.S. application Ser. No. 14/105,017), US 2014-0186919 A1 (U.S. application Ser. No. 14/104,977), US 2014-0186843 A1 (U.S. application Ser. No. 14/104,900), US 2014-0179770 A1 (U.S. application Ser. No. 14/104,837) and US 2014-0179006 A1 (U.S. application Ser. No. 14/183,486), US 2014-0170753 A1 (U.S. application Ser. No. 14/183,429); US 2015-0184139 A1 (U.S. application Ser. No. 14/324,960); Ser. No. 14/054,414 European Patent Applications EP 2771468 (EP13818570.7), EP 2764103 (EP13824232.6), and EP 2784162 (EP14170383.5); and PCT Patent Publications WO 2014/093661 (PCT/US2013/074743), WO 2014/093694 (PCT/US2013/074790), WO 2014/093595 (PCT/US2013/074611), WO 2014/093718 (PCT/US2013/074825), WO 2014/093709 (PCT/US2013/074812), WO 2014/093622 (PCT/US2013/074667), WO 2014/093635 (PCT/US2013/074691), WO 2014/093655 (PCT/US2013/074736), WO 2014/093712 (PCT/US2013/074819), WO 2014/093701 (PCT/US2013/074800), WO 2014/018423 (PCT/US2013/051418), WO 2014/204723 (PCT/US2014/041790), WO 2014/204724 (PCT/US2014/041800), WO 2014/204725 (PCT/US2014/041803), WO 2014/204726 (PCT/US2014/041804), WO 2014/204727 (PCT/US2014/041806), WO 2014/204728 (PCT/US2014/041808), WO 2014/204729 (PCT/US2014/041809), WO 2015/089351 (PCT/US2014/069897), WO 2015/089354 (PCT/US2014/069902), WO 2015/089364 (PCT/US2014/069925), WO 2015/089427 (PCT/US2014/070068), WO 2015/089462 (PCT/US2014/070127), WO 2015/089419 (PCT/US2014/070057), WO 2015/089465 (PCT/US2014/070135), WO 2015/089486 (PCT/US2014/070175), PCT/US2015/051691, PCT/US2015/051830. Reference is also made to U.S. provisional patent applications 61/758,468; 61/802,174; 61/806,375; 61/814,263; 61/819,803 and 61/828,130, filed on Jan. 30, 2013; Mar. 15, 2013; Mar. 28, 2013; Apr. 20, 2013; May 6, 2013 and May 28, 2013 respectively. Reference is also made to U.S. provisional patent application 61/836,123, filed on Jun. 17, 2013. Reference is additionally made to U.S. provisional patent applications 61/835,931, 61/835,936, 61/835,973, 61/836,080, 61/836,101, and 61/836,127, each filed Jun. 17, 2013. Further reference is made to U.S. provisional patent applications 61/862,468 and 61/862,355 filed on Aug. 5, 2013; 61/871,301 filed on Aug. 28, 2013; 61/960,777 filed on Sep. 25, 2013 and 61/961,980 filed on Oct. 28, 2013. Reference is yet further made to: PCT/US2014/62558 filed Oct. 28, 2014, and U.S. Provisional Patent Applications Ser. Nos. 61/915,148, 61/915,150, 61/915,153, 61/915,203, 61/915,251, 61/915,301, 61/915,267, 61/915,260, and 61/915,397, each filed Dec. 12, 2013; 61/757,972 and 61/768,959, filed on Jan. 29, 2013 and Feb. 25, 2013; 62/010,888 and 62/010,879, both filed Jun. 11, 2014; 62/010,329, 62/010,439 and 62/010,441, each filed Jun. 10, 2014; 61/939,228 and 61/939,242, each filed Feb. 12, 2014; 61/980,012, filed Apr. 15, 2014; 62/038,358, filed Aug. 17, 2014; 62/055,484, 62/055,460 and 62/055,487, each filed Sep. 25, 2014; and 62/069,243, filed Oct. 27, 2014. Reference is made to PCT application designating, inter alia, the United States, application No. PCT/US14/41806, filed Jun. 10, 2014. Reference is made to U.S. provisional patent application 61/930,214 filed on Jan. 22, 2014. Reference is made to PCT application designating, inter alia, the United States, application No. PCT/US14/41806, filed Jun. 10, 2014.

[0324] Mention is also made of U.S. Provisional Application No. 62/180,709, filed 17 Jun. 2015, PROTECTED GUIDE RNAS (PGRNAS); U.S. Provisional Application No. 62/091,455, filed 12 Dec. 2014, PROTECTED GUIDE RNAS (PGRNAS); U.S. Provisional Application No. 62/096,708, filed 24 Dec. 2014, PROTECTED GUIDE RNAS (PGRNAS); US Provisional Application Nos. 62/091,462, filed 12 Dec. 2014, 62/096,324, filed 23 Dec. 2014, 62/180,681, filed 17 Jun. 2015, and 62/237,496, filed 5 Oct. 2015, DEAD GUIDES FOR CRISPR TRANSCRIPTION FACTORS; US Provisional Application Nos. 62/091,456, filed 12 Dec. 2014 and 62/180,692, filed 17 Jun. 2015, ESCORTED AND FUNCTIONALIZED GUIDES FOR CRISPR-CAS SYSTEMS; U.S. Provisional Application No. 62/091,461, filed 12 Dec. 2014, DELIVERY, USE AND THERAPEUTIC APPLICATIONS OF THE CRISPR-CAS SYSTEMS AND COMPOSITIONS FOR GENOME EDITING AS TO HEMATOPOETIC STEM CELLS (HSCs); U.S. Provisional Application No. 62/094,903, filed 19 Dec. 2014, UNBIASED IDENTIFICATION OF DOUBLE-STRAND BREAKS AND GENOMIC REARRANGEMENT BY GENOME-WISE INSERT CAPTURE SEQUENCING; U.S. Provisional Application No. 62/096,761, filed 24 Dec. 2014, ENGINEERING OF SYSTEMS, METHODS AND OPTIMIZED ENZYME AND GUIDE SCAFFOLDS FOR SEQUENCE MANIPULATION; U.S. Provisional Application No. 62/098,059, filed 30 Dec. 2014, 62/181,641, filed 18 Jun. 2015, and 62/181,667, filed 18 Jun. 2015, RNA-TARGETING SYSTEM; U.S. Provisional Application No. 62/096,656, filed 24 Dec. 2014 and 62/181,151, filed 17 Jun. 2015, CRISPR HAVING OR ASSOCIATED WITH DESTABILIZATION DOMAINS; U.S. Provisional Application No. 62/096,697, filed 24 Dec. 2014, CRISPR HAVING OR ASSOCIATED WITH AAV; U.S. Provisional Application 62/098,158, filed 30 Dec. 2014, ENGINEERED CRISPR COMPLEX INSERTIONAL TARGETING SYSTEMS; U.S. Provisional Application No. 62/151,052, filed 22 Apr. 2015, CELLULAR TARGETING FOR EXTRACELLULAR EXOSOMAL REPORTING; U.S. Provisional Application No. 62/054,490, filed 24 Sep. 2014, DELIVERY, USE AND THERAPEUTIC APPLICATIONS OF THE CRISPR-CAS SYSTEMS AND COMPOSITIONS FOR TARGETING DISORDERS AND DISEASES USING PARTICLE DELIVERY COMPONENTS; U.S. Provisional Application No. 61/939,154, 12 Feb. 2014, SYSTEMS, METHODS AND COMPOSITIONS FOR SEQUENCE MANIPULATION WITH OPTIMIZED FUNCTIONAL CRISPR-CAS SYSTEMS; U.S. Provisional Application No. 62/055,484, filed 25 Sep. 2014, SYSTEMS, METHODS AND COMPOSITIONS FOR SEQUENCE MANIPULATION WITH OPTIMIZED FUNCTIONAL CRISPR-CAS SYSTEMS; U.S. Provisional Application No. 62/087,537, filed 4 Dec. 2014, SYSTEMS, METHODS AND COMPOSITIONS FOR SEQUENCE MANIPULATION WITH OPTIMIZED FUNCTIONAL CRISPR-CAS SYSTEMS; U.S. Provisional Application No. 62/054,651, filed 24 Sep. 2014, DELIVERY, USE AND THERAPEUTIC APPLICATIONS OF THE CRISPR-CAS SYSTEMS AND COMPOSITIONS FOR MODELING COMPETITION OF MULTIPLE CANCER MUTATIONS IN VIVO; U.S. Provisional Application No. 62/067,886, filed 23 Oct. 2014, DELIVERY, USE AND THERAPEUTIC APPLICATIONS OF THE CRISPR-CAS SYSTEMS AND COMPOSITIONS FOR MODELING COMPETITION OF MULTIPLE CANCER MUTATIONS IN VIVO; US Provisional Application Nos. 62/054,675, filed 24 Sep. 2014 and 62/181,002, filed 17 Jun. 2015, DELIVERY, USE AND THERAPEUTIC APPLICATIONS OF THE CRISPR-CAS SYSTEMS AND COMPOSITIONS IN NEURONAL CELLS/TISSUES; U.S. Provisional Application 62/054,528, filed 24 Sep. 2014, DELIVERY, USE AND THERAPEUTIC APPLICATIONS OF THE CRISPR-CAS SYSTEMS AND COMPOSITIONS IN IMMUNE DISEASES OR DISORDERS; U.S. Provisional Application No. 62/055,454, filed 25 Sep. 2014, DELIVERY, USE AND THERAPEUTIC APPLICATIONS OF THE CRISPR-CAS SYSTEMS AND COMPOSITIONS FOR TARGETING DISORDERS AND DISEASES USING CELL PENETRATION PEPTIDES (CPP); U.S. Provisional Application No. 62/055,460, filed 25 Sep. 2014, MULTIFUNCTIONAL-CRISPR COMPLEXES AND/OR OPTIMIZED ENZYME LINKED FUNCTIONAL-CRISPR COMPLEXES; U.S. Provisional Application No. 62/087,475, filed 4 Dec. 2014 and 62/181,690, filed 18 Jun. 2015, FUNCTIONAL SCREENING WITH OPTIMIZED FUNCTIONAL CRISPR-CAS SYSTEMS; U.S. Provisional Application 62/055,487, filed 25 Sep. 2014, FUNCTIONAL SCREENING WITH OPTIMIZED FUNCTIONAL CRISPR-CAS SYSTEMS; U.S. Provisional Application No. 62/087,546, filed 4 Dec. 2014 and 62/181,687, filed 18 Jun. 2015, MULTIFUNCTIONAL CRISPR COMPLEXES AND/OR OPTIMIZED ENZYME LINKED FUNCTIONAL-CRISPR COMPLEXES; and U.S. Provisional Application 62/098,285, filed 30 Dec. 2014, CRISPR MEDIATED IN VIVO MODELING AND GENETIC SCREENING OF TUMOR GROWTH AND METASTASIS.

[0325] Mention is made of US Provisional Application Nos. 62/181,659, filed 18 Jun. 2015 and 62/207,318, filed 19 Aug. 2015, ENGINEERING AND OPTIMIZATION OF SYSTEMS, METHODS, ENZYME AND GUIDE SCAFFOLDS OF CAS9 ORTHOLOGS AND VARIANTS FOR SEQUENCE MANIPULATION. Mention is made of US Provisional Applications Nos. 62/181,663, filed 18 Jun. 2015 and 62/245,264, filed 22 Oct. 2015, NOVEL CRISPR ENZYMES AND SYSTEMS, US Provisional Application Nos. 62/181,675, filed 18 Jun. 2015, 62/285,349, filed 22 Oct. 2015, 62/296,522, filed 17 Feb. 2016, and 62/320,231, filed 8 Apr. 2016, NOVEL CRISPR ENZYMES AND SYSTEMS, U.S. Provisional Application No. 62/232,067, filed 24 Sep. 2015, U.S. application Ser. No. 14/975,085, filed 18 Dec. 2015, European Application No. 16150428.7, U.S. Provisional Application 62/205,733, filed 16 Aug. 2015, U.S. Provisional Application 62/201,542, filed 5 Aug. 2015, U.S. Provisional Application No. 62/193,507, filed 16 Jul. 2015, and U.S. Provisional Application No. 62/181,739, filed 18 Jun. 2015, each entitled NOVEL CRISPR ENZYMES AND SYSTEMS, and of U.S. Provisional Application No. 62/245,270, filed 22 Oct. 2015, NOVEL CRISPR ENZYMES AND SYSTEMS. Mention is also made of U.S. Provisional Application No. 61/939,256, filed 12 Feb. 2014, and WO 2015/089473 (PCT/US2014/070152), filed 12 Dec. 2014, each entitled ENGINEERING OF SYSTEMS, METHODS AND OPTIMIZED GUIDE COMPOSITIONS WITH NEW ARCHITECTURES FOR SEQUENCE MANIPULATION. Mention is also made of International Application No. PCT/US2015/045504, filed 15 Aug. 2015, U.S. Provisional Application No. 62/180,699, filed 17 Jun. 2015, and U.S. Provisional Application No. 62/038,358, filed 17 Aug. 2014, each entitled GENOME EDITING USING CAS9 NICKASES.

[0326] In addition, mention is made of PCT application PCT/US14/70057, Attorney Reference 47627.99.2060 and BI-2013/107 entitled “DELIVERY, USE AND THERAPEUTIC APPLICATIONS OF THE CRISPR-CAS SYSTEMS AND COMPOSITIONS FOR TARGETING DISORDERS AND DISEASES USING PARTICLE DELIVERY COMPONENTS (claiming priority from one or more or all of US provisional patent applications: 62/054,490, filed Sep. 24, 2014; 62/010,441, filed Jun. 10, 2014; and 61/915,118, 61/915,215 and 61/915,148, each filed on Dec. 12, 2013) (“the Particle Delivery PCT”), incorporated herein by reference, and of PCT application PCT/US14/70127, Attorney Reference 47627.99.2091 and BI-2013/101 entitled “DELIVERY, USE AND THERAPEUTIC APPLICATIONS OF THE CRISPR-CAS SYSTEMS AND COMPOSITIONS FOR GENOME EDITING” (claiming priority from one or more or all of US provisional patent applications: 61/915,176; 61/915,192; 61/915,215; 61/915,107, 61/915,145; 61/915,148; and 61/915,153 each filed Dec. 12, 2013) (“the Eye PCT”), incorporated herein by reference, with respect to a method of preparing an sgRNA-and-Cas protein containing particle comprising admixing a mixture comprising an sgRNA and Cas effector protein (and optionally HDR template) with a mixture comprising or consisting essentially of or consisting of surfactant, phospholipid, biodegradable polymer, lipoprotein and alcohol; and particles from such a process. For example, wherein the Cas protein and sgRNA were mixed together at a suitable, e.g., 3:1 to 1:3 or 2:1 to 1:2 or 1:1 molar ratio, at a suitable temperature, e.g., 15-30 C, e.g., 20-25 C, e.g., room temperature, for a suitable time, e.g., 15-45, such as 30 minutes, advantageously in sterile, nuclease free buffer, e.g., 1×PBS. Separately, particle components such as or comprising: a surfactant, e.g., cationic lipid, e.g., 1,2-dioleoyl-3-trimethylammonium-propane (DOTAP); phospholipid, e.g., dimyristoylphosphatidylcholine (DMPC); biodegradable polymer, such as an ethylene-glycol polymer or PEG, and a lipoprotein, such as a low-density lipoprotein, e.g., cholesterol were dissolved in an alcohol, advantageously a C1-6 alkyl alcohol, such as methanol, ethanol, isopropanol, e.g., 100% ethanol. The two solutions were mixed together to form particles containing the Cas9-sgRNA complexes. Accordingly, sgRNA may be pre-complexed with the Cas protein, before formulating the entire complex in a particle. Formulations may be made with a different molar ratio of different components known to promote delivery of nucleic acids into cells (e.g. 1,2-dioleoyl-3-trimethylammonium-propane (DOTAP), 1,2-ditetradecanoyl-sn-glycero-3-phosphocholine (DMPC), polyethylene glycol (PEG), and cholesterol) For example DOTAP:DMPC:PEG:Cholesterol Molar Ratios may be DOTAP 100, DMPC 0, PEG 0, Cholesterol 0; or DOTAP 90, DMPC 0, PEG 10, Cholesterol 0; or DOTAP 90, DMPC 0, PEG 5, Cholesterol 5. DOTAP 100, DMPC 0, PEG 0, Cholesterol 0. Other example nucleotide-binding systems and proteins

### Other Exemplary Nucleotide-Binding Molecules and Systems

[0327] In certain embodiments, the system or composition herein comprises one or more transposases and one or more nucleotide-binding molecules that are not components of a CRISPR-Cas system. Examples of the other nucleotide-binding molecules may be components of transcription activator-like effector nuclease (TALEN), Zn finger nucleases, meganucleases, a functional fragment thereof, a variant thereof, of any combination thereof. In some examples, the systems comprise i) one or more components of a TALEN system, Zn finger nuclease system, or meganuclease system, and ii) one or more transposases described herein.

### TALE Systems

[0328] In some embodiment, the nucleotide-binding molecule in the systems may be a transcription activator-like effector nuclease, a functional fragment thereof, or a variant thereof. The present disclosure also includes nucleotide sequences that are or encode one or more components of a TALE system. As disclosed herein editing can be made by way of the transcription activator-like effector nucleases (TALENs) system. Transcription activator-like effectors (TALEs) can be engineered to bind practically any desired DNA sequence. Exemplary methods of genome editing using the TALEN system can be found for example in Cermak T. Doyle E L. Christian M. Wang L. Zhang Y. Schmidt C, et al. Efficient design and assembly of custom TALEN and other TAL effector-based constructs for DNA targeting. Nucleic Acids Res. 2011; 39:e82; Zhang F. Cong L. Lodato S. Kosuri S. Church G M. Arlotta P Efficient construction of sequence-specific TAL effectors for modulating mammalian transcription. Nat Biotechnol. 2011; 29:149-153 and U.S. Pat. Nos. 8,450,471, 8,440,431 and 8,440,432, all of which are specifically incorporated by reference.

[0329] In some embodiments, provided herein include isolated, non-naturally occurring, recombinant or engineered DNA binding proteins that comprise TALE monomers as a part of their organizational structure that enable the targeting of nucleic acid sequences with improved efficiency and expanded specificity.

[0330] Naturally occurring TALEs or “wild type TALEs” are nucleic acid binding proteins secreted by numerous species of proteobacteria. TALE polypeptides contain a nucleic acid binding domain composed of tandem repeats of highly conserved monomer polypeptides that are predominantly 33, 34 or 35 amino acids in length and that differ from each other mainly in amino acid positions 12 and 13. In advantageous embodiments the nucleic acid is DNA. As used herein, the term “polypeptide monomers”, or “TALE monomers” will be used to refer to the highly conserved repetitive polypeptide sequences within the TALE nucleic acid binding domain and the term “repeat variable di-residues” or “RVD” will be used to refer to the highly variable amino acids at positions 12 and 13 of the polypeptide monomers. As provided throughout the disclosure, the amino acid residues of the RVD are depicted using the IUPAC single letter code for amino acids. A general representation of a TALE monomer which is comprised within the DNA binding domain is X₁₋₁₁-(X₁₂X₁₃)-X₁₄₋₃₃ or ₃₄ or ₃₅, where the subscript indicates the amino acid position and X represents any amino acid. X₁₂X₁₃ indicate the RVDs. In some polypeptide monomers, the variable amino acid at position 13 is missing or absent and in such polypeptide monomers, the RVD consists of a single amino acid. In such cases the RVD may be alternatively represented as X*, where X represents X₁₂ and (*) indicates that X₁₃ is absent. The DNA binding domain comprises several repeats of TALE monomers and this may be represented as (X₁₋₁₁-(X₁₂X₁₃)-X₁₄₋₃₃ or ₃₄ or ₃₅)z, where in an advantageous embodiment, z is at least 5 to 40. In a further advantageous embodiment, z is at least 10 to 26.

[0331] The TALE monomers have a nucleotide binding affinity that is determined by the identity of the amino acids in its RVD. For example, polypeptide monomers with an RVD of NI preferentially bind to adenine (A), polypeptide monomers with an RVD of NG preferentially bind to thymine (T), polypeptide monomers with an RVD of HD preferentially bind to cytosine (C) and polypeptide monomers with an RVD of NN preferentially bind to both adenine (A) and guanine (G). In yet another embodiment of the invention, polypeptide monomers with an RVD of IG preferentially bind to T. Thus, the number and order of the polypeptide monomer repeats in the nucleic acid binding domain of a TALE determines its nucleic acid target specificity. In still further embodiments of the invention, polypeptide monomers with an RVD of NS recognize all four base pairs and may bind to A, T, G or C. The structure and function of TALEs is further described in, for example, Moscou et al., Science 326:1501 (2009); Boch et al., Science 326:1509-1512 (2009); and Zhang et al., Nature Biotechnology 29:149-153 (2011), each of which is incorporated by reference in its entirety.

[0332] The TALE polypeptides used in methods of the invention are isolated, non-naturally occurring, recombinant or engineered nucleic acid-binding proteins that have nucleic acid or DNA binding regions containing polypeptide monomer repeats that are designed to target specific nucleic acid sequences.

[0333] As described herein, polypeptide monomers having an RVD of HN or NH preferentially bind to guanine and thereby allow the generation of TALE polypeptides with high binding specificity for guanine containing target nucleic acid sequences. In a preferred embodiment of the invention, polypeptide monomers having RVDs RN, NN, NK, SN, NH, KN, HN, NQ, HH, RG, KH, RH and SS preferentially bind to guanine. In a much more advantageous embodiment of the invention, polypeptide monomers having RVDs RN, NK, NQ, HH, KH, RH, SS and SN preferentially bind to guanine and thereby allow the generation of TALE polypeptides with high binding specificity for guanine containing target nucleic acid sequences. In an even more advantageous embodiment of the invention, polypeptide monomers having RVDs HH, KH, NH, NK, NQ, RH, RN and SS preferentially bind to guanine and thereby allow the generation of TALE polypeptides with high binding specificity for guanine containing target nucleic acid sequences. In a further advantageous embodiment, the RVDs that have high binding specificity for guanine are RN, NH RH and KH. Furthermore, polypeptide monomers having an RVD of NV preferentially bind to adenine and guanine. In more preferred embodiments of the invention, polypeptide monomers having RVDs of H*, HA, KA, N*, NA, NC, NS, RA, and S* bind to adenine, guanine, cytosine and thymine with comparable affinity.

[0334] The predetermined N-terminal to C-terminal order of the one or more polypeptide monomers of the nucleic acid or DNA binding domain determines the corresponding predetermined target nucleic acid sequence to which the TALE polypeptides will bind. As used herein the polypeptide monomers and at least one or more half polypeptide monomers are “specifically ordered to target” the genomic locus or gene of interest. In plant genomes, the natural TALE-binding sites always begin with a thymine (T), which may be specified by a cryptic signal within the non-repetitive N-terminus of the TALE polypeptide; in some cases this region may be referred to as repeat 0. In animal genomes, TALE binding sites do not necessarily have to begin with a thymine (T) and TALE polypeptides may target DNA sequences that begin with T, A, G or C. The tandem repeat of TALE monomers always ends with a half-length repeat or a stretch of sequence that may share identity with only the first 20 amino acids of a repetitive full length TALE monomer and this half repeat may be referred to as a half-monomer (FIG. 8), which is included in the term “TALE monomer”. Therefore, it follows that the length of the nucleic acid or DNA being targeted is equal to the number of full polypeptide monomers plus two.

[0335] As described in Zhang et al., Nature Biotechnology 29:149-153 (2011), TALE polypeptide binding efficiency may be increased by including amino acid sequences from the “capping regions” that are directly N-terminal or C-terminal of the DNA binding region of naturally occurring TALEs into the engineered TALEs at positions N-terminal or C-terminal of the engineered TALE DNA binding region. Thus, in certain embodiments, the TALE polypeptides described herein further comprise an N-terminal capping region and/or a C-terminal capping region.

[0336] An exemplary amino acid sequence of a N-terminal capping region is:

(SEQ ID NO: 1)
MDPIRSRTPSPARELLSGPQPDGVQPTADRGVSP
PAGGPLDGLPARRTMSRTRLPSPPAPSPAFSADS
FSDLLRQFDPSLFNTSLFDSLPPFGAHHTEAATG
EWDEVQSGLRAADAPPPTMRVAVTAARPPRAKPA
PRRRAAQPSDASPAAQVDLRTLGYSQQQQEKIKP
KVRSTVAQHHEALVGHGFTHAHIVALSQHPAALG
TVAVKYQDMIAALPEATHEAIVGVGKQWSGARAL
EALLTVAGELRGPPLQLDTGQLLKIAKRGGVTAV
EAVHAWRNALTGAPLN

[0337] An exemplary amino acid sequence of a C-terminal capping region is:

(SEQ ID NO: 2)
RPALESIVAQLSRPDPALAALTNDHLVALACLG
GRPALDAVKKGLPHAPALIKRTNRRIPERTSHR
VADHAQVVRVLGFFQCHSHPAQAFDDAMTQFGM
SRHGLLQLFRRVGVTELEARSGTLPPASQRWDR
ILQASGMKRAKPSPTSTQTPDQASLHAFADSLE
RDLDAPSPMHEGDQTRAS

[0338] As used herein the predetermined “N-terminus” to “C terminus” orientation of the N-terminal capping region, the DNA binding domain comprising the repeat TALE monomers and the C-terminal capping region provide structural basis for the organization of different domains in the d-TALEs or polypeptides of the invention.

[0339] The entire N-terminal and/or C-terminal capping regions are not necessary to enhance the binding activity of the DNA binding region. Therefore, in certain embodiments, fragments of the N-terminal and/or C-terminal capping regions are included in the TALE polypeptides described herein.

[0340] In certain embodiments, the TALE polypeptides described herein contain a N-terminal capping region fragment that included at least 10, 20, 30, 40, 50, 54, 60, 70, 80, 87, 90, 94, 100, 102, 110, 117, 120, 130, 140, 147, 150, 160, 170, 180, 190, 200, 210, 220, 230, 240, 250, 260 or 270 amino acids of an N-terminal capping region. In certain embodiments, the N-terminal capping region fragment amino acids are of the C-terminus (the DNA-binding region proximal end) of an N-terminal capping region. As described in Zhang et al., Nature Biotechnology 29:149-153 (2011), N-terminal capping region fragments that include the C-terminal 240 amino acids enhance binding activity equal to the full length capping region, while fragments that include the C-terminal 147 amino acids retain greater than 80% of the efficacy of the full length capping region, and fragments that include the C-terminal 117 amino acids retain greater than 50% of the activity of the full-length capping region.

[0341] In some embodiments, the TALE polypeptides described herein contain a C-terminal capping region fragment that included at least 6, 10, 20, 30, 37, 40, 50, 60, 68, 70, 80, 90, 100, 110, 120, 127, 130, 140, 150, 155, 160, 170, 180 amino acids of a C-terminal capping region. In certain embodiments, the C-terminal capping region fragment amino acids are of the N-terminus (the DNA-binding region proximal end) of a C-terminal capping region. As described in Zhang et al., Nature Biotechnology 29:149-153 (2011), C-terminal capping region fragments that include the C-terminal 68 amino acids enhance binding activity equal to the full length capping region, while fragments that include the C-terminal 20 amino acids retain greater than 50% of the efficacy of the full length capping region.

[0342] In certain embodiments, the capping regions of the TALE polypeptides described herein do not need to have identical sequences to the capping region sequences provided herein. Thus, in some embodiments, the capping region of the TALE polypeptides described herein have sequences that are at least 50%, 60%, 70%, 80%, 85%, 90%, 91%, 92%, 93%, 94%, 95%, 96%, 97%, 98% or 99% identical or share identity to the capping region amino acid sequences provided herein. Sequence identity is related to sequence homology. Homology comparisons may be conducted by eye, or more usually, with the aid of readily available sequence comparison programs. These commercially available computer programs may calculate percent (%) homology between two or more sequences and may also calculate the sequence identity shared by two or more amino acid or nucleic acid sequences. In some preferred embodiments, the capping region of the TALE polypeptides described herein have sequences that are at least 95% identical or share identity to the capping region amino acid sequences provided herein.

[0343] Sequence homologies may be generated by any of a number of computer programs known in the art, which include but are not limited to BLAST or FASTA. Suitable computer program for carrying out alignments like the GCG Wisconsin Bestfit package may also be used. Once the software has produced an optimal alignment, it is possible to calculate % homology, preferably % sequence identity. The software typically does this as part of the sequence comparison and generates a numerical result.

[0344] In some embodiments described herein, the TALE polypeptides of the invention include a nucleic acid binding domain linked to the one or more effector domains. The terms “effector domain” or “regulatory and functional domain” refer to a polypeptide sequence that has an activity other than binding to the nucleic acid sequence recognized by the nucleic acid binding domain. By combining a nucleic acid binding domain with one or more effector domains, the polypeptides of the invention may be used to target the one or more functions or activities mediated by the effector domain to a particular target DNA sequence to which the nucleic acid binding domain specifically binds.

[0345] In some embodiments of the TALE polypeptides described herein, the activity mediated by the effector domain is a biological activity. For example, in some embodiments the effector domain is a transcriptional inhibitor (i.e., a repressor domain), such as an mSin interaction domain (SID). SID4X domain or a Krüppel-associated box (KRAB) or fragments of the KRAB domain. In some embodiments the effector domain is an enhancer of transcription (i.e. an activation domain), such as the VP16, VP64 or p65 activation domain. In some embodiments, the nucleic acid binding is linked, for example, with an effector domain that includes but is not limited to a transposase, integrase, recombinase, resolvase, invertase, protease, DNA methyltransferase, DNA demethylase, histone acetylase, histone deacetylase, nuclease, transcriptional repressor, transcriptional activator, transcription factor recruiting, protein nuclear-localization signal or cellular uptake signal.

[0346] In some embodiments, the effector domain is a protein domain which exhibits activities which include but are not limited to transposase activity, integrase activity, recombinase activity, resolvase activity, invertase activity, protease activity, DNA methyltransferase activity, DNA demethylase activity, histone acetylase activity, histone deacetylase activity, nuclease activity, nuclear-localization signaling activity, transcriptional repressor activity, transcriptional activator activity, transcription factor recruiting activity, or cellular uptake signaling activity. Other preferred embodiments of the invention may include any combination the activities described herein.

### Zn-Finger Nucleases

[0347] In some embodiment, the nucleotide-binding molecule of the systems may be a Zn-finger nuclease, a functional fragment thereof, or a variant thereof. The composition may comprise one or more Zn-finger nucleases or nucleic acids encoding thereof. In some cases, the nucleotide sequences may comprise coding sequences for Zn-Finger nucleases. Other preferred tools for genome editing for use in the context of this invention include zinc finger systems and TALE systems. One type of programmable DNA-binding domain is provided by artificial zinc-finger (ZF) technology, which involves arrays of ZF modules to target new DNA-binding sites in the genome. Each finger module in a ZF array targets three DNA bases. A customized array of individual zinc finger domains is assembled into a ZF protein (ZFP).

[0348] ZFPs can comprise a functional domain. The first synthetic zinc finger nucleases (ZFNs) were developed by fusing a ZF protein to the catalytic domain of the Type IIS restriction enzyme FokI. (Kim, Y. G. et al., 1994, Chimeric restriction endonuclease, Proc. Natl. Acad. Sci. U.S.A. 91, 883-887; Kim, Y. G. et al., 1996, Hybrid restriction enzymes: zinc finger fusions to FokI cleavage domain. Proc. Natl. Acad. Sci. U.S.A. 93, 1156-1160). Increased cleavage specificity can be attained with decreased off target activity by use of paired ZFN heterodimers, each targeting different nucleotide sequences separated by a short spacer. (Doyon, Y. et al., 2011, Enhancing zinc-finger-nuclease activity with improved obligate heterodimeric architectures. Nat. Methods 8, 74-79). ZFPs can also be designed as transcription activators and repressors and have been used to target many genes in a wide variety of organisms. Exemplary methods of genome editing using ZFNs can be found for example in U.S. Pat. Nos. 6,534,261, 6,607,882, 6,746,838, 6,794,136, 6,824,978, 6,866,997, 6,933,113, 6,979,539, 7,013,219, 7,030,215, 7,220,719, 7,241,573, 7,241,574, 7,585,849, 7,595,376, 6,903,185, and 6,479,626, all of which are specifically incorporated by reference.

### Meganucleases

[0349] In some embodiment, the nucleotide-binding domain may be a meganuclease, a functional fragment thereof, or a variant thereof. The composition may comprise one or more meganucleases or nucleic acids encoding thereof. As disclosed herein editing can be made by way of meganucleases, which are endodeoxyribonucleases characterized by a large recognition site (double-stranded DNA sequences of 12 to 40 base pairs). In some cases, the nucleotide sequences may comprise coding sequences for meganucleases. Exemplary method for using meganucleases can be found in U.S. Pat. Nos. 8,163,514; 8,133,697; 8,021,867; 8,119,361; 8,119,381; 8,124,369; and 8,129,134, which are specifically incorporated by reference.

[0350] In certain embodiments, any of the nucleases, including the modified nucleases as described herein, may be used in the methods, compositions, and kits according to the invention. In particular embodiments, nuclease activity of an unmodified nuclease may be compared with nuclease activity of any of the modified nucleases as described herein, e.g. to compare for instance off-target or on-target effects. Alternatively, nuclease activity (or a modified activity as described herein) of different modified nucleases may be compared, e.g. to compare for instance off-target or on-target effects.

### Linkers

[0351] The transposase(s) and the Cas protein(s) may be associated via a linker. The term “linker” refers to a molecule which joins the proteins to form a fusion protein. Generally, such molecules have no specific biological activity other than to join or to preserve some minimum distance or other spatial relationship between the proteins. However, in certain embodiments, the linker may be selected to influence some property of the linker and/or the fusion protein such as the folding, net charge, or hydrophobicity of the linker.

[0352] Suitable linkers for use in the methods herein include straight or branched-chain carbon linkers, heterocyclic carbon linkers, or peptide linkers. However, as used herein the linker may also be a covalent bond (carbon-carbon bond or carbon-heteroatom bond). In particular embodiments, the linker is used to separate the Cas protein and the transposase by a distance sufficient to ensure that each protein retains its required functional property. A peptide linker sequences may adopt a flexible extended conformation and do not exhibit a propensity for developing an ordered secondary structure. In certain embodiments, the linker can be a chemical moiety which can be monomeric, dimeric, multimeric or polymeric. Preferably, the linker comprises amino acids. Typical amino acids in flexible linkers include Gly, Asn and Ser. Accordingly, in particular embodiments, the linker comprises a combination of one or more of Gly, Asn and Ser amino acids. Other near neutral amino acids, such as Thr and Ala, also may be used in the linker sequence. Exemplary linkers are disclosed in Maratea et al. (1985), Gene 40: 39-46; Murphy et al. (1986) Proc. Nat'l. Acad. Sci. USA 83: 8258-62; U.S. Pat. Nos. 4,935,233; and 4,751,180.

[0353] For example, GlySer linkers GGS, GGGS (SEQ ID NO: 3) or GSG can be used. GGS, GSG, GGGS (SEQ ID NO: 3) or GGGGS (SEQ ID NO: 4) linkers can be used in repeats of 3 (such as (GGS)₃ (SEQ ID NO: 5), (GGGGS)₃ (SEQ ID NO: 6)) or 5, 6, 7, 9 or even 12 or more, to provide suitable lengths. In some cases, the linker may be (GGGGS)₃₋₁₅, For example, in some cases, the linker may be (GGGGS)₃₋₁₁, e.g., GGGGS (SEQ ID NO: 4), (GGGGS)₂(SEQ ID NO: 7), (GGGGS)₃ (SEQ ID NO: 6), (GGGGS)₄ (SEQ ID NO: 8), (GGGGS)₅ (SEQ ID NO: 9), (GGGGS)₆ (SEQ ID NO: 10), (GGGGS)₇ (SEQ ID NO: 11), (GGGGS)₈ (SEQ ID NO: 12), (GGGGS)₉ (SEQ ID NO: 13), (GGGGS)₁₀ (SEQ ID NO: 14), or (GGGGS)₁₁ (SEQ ID NO: 15).

[0354] In particular embodiments, linkers such as (GGGGS)₃ (SEQ ID NO: 6) are preferably used herein. (GGGGS)₆ (SEQ ID NO: 10), (GGGGS)₉ (SEQ ID NO: 13) or (GGGGS)₁₂ (SEQ ID NO: 16) may be used as alternatives. Other alternatives include (GGGGS)₁ (SEQ ID NO: 4), (GGGGS)₂ (SEQ ID NO: 7), (GGGGS)₄ (SEQ ID NO: 8), (GGGGS)₅ (SEQ ID NO: 9), (GGGGS)₇ (SEQ ID NO: 11), (GGGGS)₈ (SEQ ID NO: 12), (GGGGS)₁₀ (SEQ ID NO: 14), or (GGGGS)₁₁ (SEQ ID NO: 15). In yet a further embodiment, LEPGEKPYKCPECGKSFSQSGALTRHQRTHTR (SEQ ID NO: 17) is used as a linker. In yet an additional embodiment, the linker is an XTEN linker. In particular embodiments, the Cas protein is linked to the deaminase protein or its catalytic domain by means of an LEPGEKPYKCPECGKSFSQSGALTRHQRTHTR (SEQ ID NO: 17) linker. In further particular embodiments, the Cas protein is linked C-terminally to the N-terminus of a deaminase protein or its catalytic domain by means of an LEPGEKPYKCPECGKSFSQSGALTRHQRTHTR (SEQ ID NO: 17) linker. In addition, N- and C-terminal NLSs can also function as linker (e.g., PKKKRKVEASSPKKRKVEAS (SEQ ID NO: 18)). Examples of linkers are shown in Table 1 below.

TABLE 1

| | |
|---|---|
| GGS | GGTGGTAGT (SEQ ID NO: 19) |
| GGSx3 (9) | GGTGGTAGTGGAGGGAGCGGCGGTTCA (SEQ ID NO: 20) |
| (SEQ ID NO: | |
| 5) | |
| GGSx7 (21) | ggtggaggaggctctggtggaggcggtagcggaggcggagggtcgGGTGGTAGTGGAGGG |
| SEQ ID NO: | AGCGGCGGTTCA (SEQ ID NO: 22) |
| 21) | |
| XTEN | TCGGGATCTGAGACGCCTGGGACCTCGGAATCGGCTACGCCCGAA |
| | AGT (SEQ ID NO: 23) |
| Z- | Gtggataacaaatttaacaaagaaatgtgggcggcgtgggaagaaattcgtaacctgccgaacctgaacggc |
| EGFR_Short | tggcagatgaccgcgtttattgcgagcctggtggatgatccgagccagagcgcgaacctgctggcggaagcg |
| | aaaaaactgaacgatgcgcaggcgccgaaaaccggcggtggttctggt (SEQ ID NO: 24) |
| GSAT | Ggtggttctgccggtggctccggttctggctccagcggtggcagctctggtgcgtccggcacgggtactgcg |
| | ggtggcactggcagcggttccggtactggctctggc (SEQ ID NO: 25) |

[0355] Linkers may be used between the guide RNAs and the functional domain (activator or repressor), or between the Cas protein and the transposase(s). The linkers may be used to engineer appropriate amounts of“mechanical flexibility”. t02991 In certain embodiments, the one or more functional domains are controllable, e.g., inducible.

### Targeting Moieties

[0356] The systems may further comprise one or more targeting moieties. The targeting moieties may bind to specific cells or tissues, e.g., by binding to surface receptor proteins. Likewise, the following table provides exemplary targeting moieties that can be used in the practice of the invention an as to each an aspect of the invention provides a system that comprises such a targeting moiety as shown below in Table 2.

TABLE 2

| Targeting Moiety | Target Molecule | Target Cell or Tissue |
|---|---|---|
| folate | folate receptor | cancer cells |
| transferrin | transferrin receptor | cancer cells |
| Antibody CC52 | rat CC531 | rat colon adenocarcinoma CC531 |
| anti- HER2 antibody | HER2 | HER2 -overexpressing tumors |
| anti-GD2 | GD2 | neuroblastoma, melanoma |
| anti-EGFR | EGFR | tumor cells overexpressing EGFR |
| pH-dependent fusogenic | | ovarian carcinoma |
| peptide diINF-7 | | |
| anti-VEGFR | VEGF Receptor | tumor vasculature |
| anti-CD19 | CD19 (B cell marker) | leukemia, lymphoma |
| cell-penetrating peptide | | blood-brain barrier |
| cyclic arginine-glycine- | avβ3 | glioblastoma cells, human umbilical |
| aspartic acid-tyrosine- | | vein endothelial cells, |
| cysteine peptide | | tumor angiogenesis |
| (c(RGDyC)-LP) | | |
| ASSHN peptide | | endothelial progenitor cells; anti- |
| | | cancer |
| PR_b peptide | α₅β₁ integrin | cancer cells |
| AG86 peptide | α₆β₄ integrin | cancer cells |
| KCCYSL (P6.1 peptide) | HER-2 receptor | cancer cells |
| affinity peptide LN | Aminopeptidase N | APN-positive tumor |
| (YEVGHRC) | (APN/CD13) | |
| synthetic somatostatin | Somatostatin receptor 2 | breast cancer |
| analogue | (SSTR2) | |
| anti-CD20 monoclonal | B-lymphocytes | B cell lymphoma |
| antibody | | |

[0357] Thus, in an embodiment of the systems, the targeting moiety comprises a receptor ligand, such as, for example, hyaluronic acid for CD44 receptor, galactose for hepatocytes, or antibody or fragment thereof such as a binding antibody fragment against a desired surface receptor, and as to each of a targeting moiety comprising a receptor ligand, or an antibody or fragment thereof such as a binding fragment thereof, such as against a desired surface receptor, there is an aspect of the invention wherein the system comprises a targeting moiety comprising a receptor ligand, or an antibody or fragment thereof such as a binding fragment thereof, such as against a desired surface receptor, or hyaluronic acid for CD44 receptor, galactose for hepatocytes (see, e.g., Surace et al, “Lipoplexes targeting the CD44 hyaluronic acid receptor for efficient transfection of breast cancer cells,” J. Mol Pharm 6(4):1062-73; doi: 10.1021/mp800215d (2009); Sonoke et al, “Galactose-modified cationic liposomes as a liver-targeting delivery system for small interfering RNA,” Biol Pharm Bull. 34(8):1338-42 (2011); Torchilin, “Antibody-modified liposomes for cancer chemotherapy,” Expert Opin. Drug Deliv. 5 (9), 1003-1025 (2008); Manjappa et al, “Antibody derivatization and conjugation strategies: application in preparation of stealth immunoliposome to target chemotherapeutics to tumor,” J. Control. Release 150 (1), 2-22 (2011); Sofou S “Antibody-targeted liposomes in cancer therapy and imaging,” Expert Opin. Drug Deliv. 5 (2): 189-204 (2008); Gao J et al, “Antibody-targeted immunoliposomes for cancer treatment,” Mini. Rev. Med. Chem. 13(14): 2026-2035 (2013); Molavi et al, “Anti-CD30 antibody conjugated liposomal doxorubicin with significantly improved therapeutic efficacy against anaplastic large cell lymphoma,” Biomaterials 34(34):8718-25 (2013), each of which and the documents cited therein are hereby incorporated herein by reference).

[0358] Moreover, in view of the teachings herein the skilled artisan can readily select and apply a desired targeting moiety in the practice of the invention as to a lipid entity of the invention. The invention comprehends an embodiment wherein the system comprises a lipid entity having a targeting moiety.

### Nuclear Localization Signals

[0359] In some embodiments, the systems and compositions herein further comprises one or more nuclear localization signals (NLSs). The NLS may be capable of driving the accumulation of the components, e.g., Cas and/or transposase(s) to a desired amount in the nucleus of a cell.

[0360] In certain embodiments, at least one nuclear localization signal (NLS) is attached to the Cas and/or transposase(s). In some embodiments, one or more C-terminal or N-terminal NLSs are attached (and hence nucleic acid molecule(s) coding for the Cas and/or transposase(s) can include coding for NLS(s) so that the expressed product has the NLS(s) attached or connected). In a preferred embodiment a C-terminal NLS is attached for optimal expression and nuclear targeting in eukaryotic cells, e.g., human cells.

[0361] The NLS may be monopartite. In certain cases, the NLS may be bipartite. These types of NLSs can be further classified as either monopartite or bipartite. The two basic amino acid clusters in bipartite NLSs are separated by a short spacer sequence (e.g., about 10 amino acids), while monopartite NLSs are not. In some cases, one or more monopartite NSLs is attached to the Cas and/or transposase(s). In certain cases, one or more bipartite NSLs is attached to the Cas and/or transposase(s). In some cases, one or more monopartite NSLs and one or more bipartite NSLs are attached to the Cas and/or transposase(s).

[0362] Non-limiting examples of NLSs include an NLS sequence derived from: the NLS of the SV40 virus large T-antigen, having the amino acid sequence PKKKRKV (SEQ ID NO: 26); the NLS from nucleoplasmin (e.g., the nucleoplasmin bipartite NLS with the sequence KRPAATKKAGQAKKK (SEQ ID NO: 27)); the c-myc NLS having the amino acid sequence PAAKRVKLD (SEQ ID NO: 28) or RQRRNELKRS (SEQ ID NO: 29); the hRNPA1 M9 NLS having the sequence NQSSNFGPMKGGNFGGRSSGPYGGGGQYFAKPRNQGGY (SEQ ID NO: 30); the sequence RMRIZFKNKGKDTAELRRRRVEVSVELRKAKKDEQILKRRNV (SEQ ID NO: 31) of the IBB domain from importin-alpha; the sequences VSRKRPRP (SEQ ID NO: 32) and PPKKARED (SEQ ID NO: 33) of the myoma T protein; the sequence PQPKKKPL (SEQ ID NO: 34) of human p53; the sequence SALIKKKKKMAP (SEQ ID NO: 35) of mouse c-abl IV; the sequences DRLRR (SEQ ID NO: 36) and PKQKKRK (SEQ ID NO: 37) of the influenza virus NS1; the sequence RKLKKKIKKL (SEQ ID NO: 38) of the Hepatitis virus delta antigen; the sequence REKKKFLKRR (SEQ ID NO: 39) of the mouse Mxl protein; the sequence KRKGDEVDGVDEVAKKKSKK (SEQ ID NO: 40) of the human poly(ADP-ribose) polymerase; and the sequence RKCLQAGMNLEARKTKK (SEQ ID NO: 41) of the steroid hormone receptors (human) glucocorticoid.

[0363] In some embodiments, a NLS is a heterologous NLS. For example, the NLS is not naturally present in the molecule (e.g., Cas and/or transposase(s)) it attached to.

[0364] In general, strength of nuclear localization activity may derive from the number of NLSs in the nucleic acid-targeting effector protein, the particular NLS(s) used, or a combination of these factors. Detection of accumulation in the nucleus may be performed by any suitable technique. For example, a detectable marker may be fused to the nucleic acid-targeting protein, such that location within a cell may be visualized, such as in combination with a means for detecting the location of the nucleus (e.g., a stain specific for the nucleus such as DAPI).

[0365] In some embodiments, a vector described herein (e.g., those comprising polynucleotides encoding Cas and/or transposase(s)) comprise one or more nuclear localization sequences (NLSs), such as about or more than about 1, 2, 3, 4, 5, 6, 7, 8, 9, 10, or more NLSs. More particularly, vector comprises one or more NLSs not naturally present in the Cas and/or transposase(s). Most particularly, the NLS is present in the vector 5′ and/or 3′ of the Cas and/or transposase(s) sequence. In some embodiments, the Cas and/or transposase(s) comprises about or more than about 1, 2, 3, 4, 5, 6, 7, 8, 9, 10, or more NLSs at or near the amino-terminus, about or more than about 1, 2, 3, 4, 5, 6, 7, 8, 9, 10, or more NLSs at or near the carboxy-terminus, or a combination of these (e.g., zero or at least one or more NLS at the amino-terminus and zero or at one or more NLS at the carboxy terminus). When more than one NLS is present, each may be selected independently of the others, such that a single NLS may be present in more than one copy and/or in combination with one or more other NLSs present in one or more copies. In some embodiments, an NLS is considered near the N- or C-terminus when the nearest amino acid of the NLS is within about 1, 2, 3, 4, 5, 10, 15, 20, 25, 30, 40, 50, or more amino acids along the polypeptide chain from the N- or C-terminus.

[0366] In certain embodiments, other localization tags may be fused to the Cas and/or transposase(s), such as without limitation for localizing to particular sites in a cell, such as organelles, such mitochondria, plastids, chloroplast, vesicles, golgi, (nuclear or cellular) membranes, ribosomes, nucleolus, ER, cytoskeleton, vacuoles, centrosome, nucleosome, granules, centrioles, etc.

### Heterologous Components

[0367] In some embodiments, the components in the system may be heterologous, i.e., they do not naturally occur together in the same cell or an organism. For example, one or more of: Cas protein(s), transposase(s), other functional domain(s), guide molecules, donor polynucleotides, and target sequences, may be heterologous in view of the other components in the system (i.e., they do not naturally occur together with other components of the systems in the same cell or an organism).

[0368] In some examples, the system comprises one or more heterologous guide molecules. The heterologous guide molecules may not naturally occur in the same cell or organism with Cas protein(s), transposase(s) in the system. Such a guide molecule may comprise a heterologous guide sequence, which does not naturally occur in the same molecule with the rest of the guide molecule. In some examples, the guide molecule may not occur in nature, e.g., may be artificially synthesized.

[0369] In some examples, the system may comprise one or more heterologous donor polynucleotides. The heterologous donor polynucleotides may not naturally occur in the same cell or organism with a other components in the system. Such a donor polynucleotides may comprise a heterologous insertion sequence, which does not naturally occur in the same molecule with the rest of the guide molecule. In some examples, the heterologous donor polynucleotides may not occur in nature, e.g., may be artificially synthesized.

### Chimeric Systems

[0370] In some embodiments, the systems comprise one or more Tn7 transposase is derived from a first species and the one or more Type I-B Cas proteins is derived from a second species different from the first species. In some examples, the systems have two TnsDIs, one from the first species and the other from the second species. In some examples, the systems comprise Cas5, Cas6, Cas7, Cas8, crRNA and TnsD1 from a first species and TnsD1, TnsC, TnsB, TnsA and donor polynucleotide from a second species. In some cases, the systems may further comprise Cas6 and Cas7 of the second species.

[0371] In one example, the system comprise Cas5, Cas6, Cas7, Cas8, crRNA and TnsD1 of t24 and TnsD1, TnsC, TnsB, TnsA and donor polynucleotide (and optionally Cas6 and Cas7) of 1B29. In one example, the system comprise Cas5, Cas6, Cas7, Cas8, crRNA and TnsD1 of t24 and TnsD1, TnsC, TnsB, TnsA and donor polynucleotide (and optionally Cas6 and Cas7) of IB18. In one example, the system comprise Cas5, Cas6, Cas7, Cas8, crRNA and TnsD1 of IB29 and TnsD1, TnsC, TnsB, TnsA and donor polynucleotide (and optionally Cas6 and Cas7) of t24. In one example, the system comprise Cas5, Cas6, Cas7, Cas8, crRNA and TnsD1 of IB29 and TnsD1, TnsC, TnsB, TnsA and donor polynucleotide (and optionally Cas6 and Cas7) of IB18. In one example, the system comprise Cas5, Cas6, Cas7, Cas8, crRNA and TnsD1 of IB18 and TnsD1, TnsC, TnsB, TnsA and donor polynucleotide (and optionally Cas6 and Cas7) of t24. In one example, the system comprise Cas5, Cas6, Cas7, Cas8, crRNA and TnsD1 of IB18 and TnsD1, TnsC, TnsB, TnsA and donor polynucleotide (and optionally Cas6 and Cas7) of IB29.

### Polynucleotides and Vectors

[0372] The systems herein may comprise one or more polynucleotides. The polynucleotide(s) may comprise coding sequences of Cas protein(s), transposase(s), guide molecule(s), donor polynucleotide(s), or any combination thereof. The present disclosure further provides vectors or vector systems comprising one or more polynucleotides herein. The vectors or vector systems include those described in the delivery sections herein.

[0373] The terms “polynucleotide”, “nucleotide”, “nucleotide sequence”, “nucleic acid” and “oligonucleotide” are used interchangeably. They refer to a polymeric form of nucleotides of any length, either deoxyribonucleotides or ribonucleotides, or analogs thereof. Polynucleotides may have any three dimensional structure, and may perform any function, known or unknown. The following are non-limiting examples of polynucleotides: coding or non-coding regions of a gene or gene fragment, loci (locus) defined from linkage analysis, exons, introns, messenger RNA (mRNA), transfer RNA, ribosomal RNA, short interfering RNA (siRNA), short-hairpin RNA (shRNA), micro-RNA (miRNA), ribozymes, cDNA, recombinant polynucleotides, branched polynucleotides, plasmids, vectors, isolated DNA of any sequence, isolated RNA of any sequence, nucleic acid probes, and primers. The term also encompasses nucleic-acid-like structures with synthetic backbones, see, e.g., Eckstein, 1991; Baserga et al., 1992; Milligan, 1993; WO 97/03211; WO 96/39154; Mata, 1997; Strauss-Soukup, 1997; and Samstag, 1996. A polynucleotide may comprise one or more modified nucleotides, such as methylated nucleotides and nucleotide analogs. If present, modifications to the nucleotide structure may be imparted before or after assembly of the polymer. The sequence of nucleotides may be interrupted by non-nucleotide components. A polynucleotide may be further modified after polymerization, such as by conjugation with a labeling component. As used herein the term “wild type” is a term of the art understood by skilled persons and means the typical form of an organism, strain, gene or characteristic as it occurs in nature as distinguished from mutant or variant forms. A “wild type” can be a base line. As used herein the term “variant” should be taken to mean the exhibition of qualities that have a pattern that deviates from what occurs in nature. The terms “non-naturally occurring” or “engineered” are used interchangeably and indicate the involvement of the hand of man. The terms, when referring to nucleic acid molecules or polypeptides mean that the nucleic acid molecule or the polypeptide is at least substantially free from at least one other component with which they are naturally associated in nature and as found in nature. “Complementarity” refers to the ability of a nucleic acid to form hydrogen bond(s) with another nucleic acid sequence by either traditional Watson-Crick base pairing or other non-traditional types. A percent complementarity indicates the percentage of residues in a nucleic acid molecule which can form hydrogen bonds (e.g., Watson-Crick base pairing) with a second nucleic acid sequence (e.g., 5, 6, 7, 8, 9, 10 out of 10 being 50%, 60%, 70%, 80%, 90%, and 100% complementary). “Perfectly complementary” means that all the contiguous residues of a nucleic acid sequence will hydrogen bond with the same number of contiguous residues in a second nucleic acid sequence. “Substantially complementary” as used herein refers to a degree of complementarity that is at least 60%, 65%, 70%, 75%, 80%, 85%, 90%, 95%, 97%, 98%, 99%, or 100% over a region of 8, 9, 10, 11, 12, 13, 14, 15, 16, 17, 18, 19, 20, 21, 22, 23, 24, 25, 30, 35, 40, 45, 50, or more nucleotides, or refers to two nucleic acids that hybridize under stringent conditions. As used herein, “stringent conditions” for hybridization refer to conditions under which a nucleic acid having complementarity to a target sequence predominantly hybridizes with the target sequence, and substantially does not hybridize to non-target sequences. Stringent conditions are generally sequence-dependent, and vary depending on a number of factors. In general, the longer the sequence, the higher the temperature at which the sequence specifically hybridizes to its target sequence. Non-limiting examples of stringent conditions are described in detail in Tijssen (1993), Laboratory Techniques In Biochemistry And Molecular Biology-Hybridization With Nucleic Acid Probes Part I, Second Chapter “Overview of principles of hybridization and the strategy of nucleic acid probe assay”, Elsevier, N.Y. Where reference is made to a polynucleotide sequence, then complementary or partially complementary sequences are also envisaged. These are preferably capable of hybridizing to the reference sequence under highly stringent conditions. Generally, in order to maximize the hybridization rate, relatively low-stringency hybridization conditions are selected: about 20 to 25° C. lower than the thermal melting point (Tm). The Tm is the temperature at which 50% of specific target sequence hybridizes to a perfectly complementary probe in solution at a defined ionic strength and pH. Generally, in order to require at least about 85% nucleotide complementarity of hybridized sequences, highly stringent washing conditions are selected to be about 5 to 15° C. lower than the Tm. A sequence capable of hybridizing with a given sequence is referred to as the “complement” of the given sequence.

[0374] As used herein, the term “genomic locus” or “locus” (plural loci) is the specific location of a gene or DNA sequence on a chromosome. A “gene” refers to stretches of DNA or RNA that encode a polypeptide or an RNA chain that has functional role to play in an organism and hence is the molecular unit of heredity in living organisms. It may be considered that genes include regions which regulate the production of the gene product, whether or not such regulatory sequences are adjacent to coding and/or transcribed sequences. Accordingly, a gene includes, but is not necessarily limited to, promoter sequences, terminators, translational regulatory sequences such as ribosome binding sites and internal ribosome entry sites, enhancers, silencers, insulators, boundary elements, replication origins, matrix attachment sites and locus control regions. As used herein, “expression of a genomic locus” or “gene expression” is the process by which information from a gene is used in the synthesis of a functional gene product. The products of gene expression are often proteins, but in non-protein coding genes such as rRNA genes or tRNA genes, the product is functional RNA. The process of gene expression is used by all known life—eukaryotes (including multicellular organisms), prokaryotes (bacteria and archaea) and viruses to generate functional products to survive. As used herein “expression” of a gene or nucleic acid encompasses not only cellular gene expression, but also the transcription and translation of nucleic acid(s) in cloning systems and in any other context. As used herein, “expression” also refers to the process by which a polynucleotide is transcribed from a DNA template (such as into and mRNA or other RNA transcript) and/or the process by which a transcribed mRNA is subsequently translated into peptides, polypeptides, or proteins. Transcripts and encoded polypeptides may be collectively referred to as “gene product.” If the polynucleotide is derived from genomic DNA, expression may include splicing of the mRNA in a eukaryotic cell. The terms “polypeptide”, “peptide” and “protein” are used interchangeably herein to refer to polymers of amino acids of any length. The polymer may be linear or branched, it may comprise modified amino acids, and it may be interrupted by non-amino acids. The terms also encompass an amino acid polymer that has been modified; for example, disulfide bond formation, glycosylation, lipidation, acetylation, phosphorylation, or any other manipulation, such as conjugation with a labeling component. As used herein the term “amino acid” includes natural and/or unnatural or synthetic amino acids, including glycine and both the D or L optical isomers, and amino acid analogs and peptidomimetics. As used herein, the term “domain” or “protein domain” refers to a part of a protein sequence that may exist and function independently of the rest of the protein chain. As described in aspects, sequence identity is related to sequence homology. Homology comparisons may be conducted by eye, or more usually, with the aid of readily available sequence comparison programs. These commercially available computer programs may calculate percent (%) homology between two or more sequences and may also calculate the sequence identity shared by two or more amino acid or nucleic acid sequences.

[0375] In certain embodiments, the polynucleotide sequence is recombinant DNA. In further embodiments, the polynucleotide sequence further comprises additional sequences as described elsewhere herein. In certain embodiments, the nucleic acid sequence is synthesized in vitro.

[0376] Aspects of the disclosure relate to polynucleotide molecules that encode one or more components of the systems as referred to in any embodiment herein. In certain embodiments, the polynucleotide molecules may comprise further regulatory sequences. By means of guidance and not limitation, the polynucleotide sequence can be part of an expression plasmid, a minicircle, a lentiviral vector, a retroviral vector, an adenoviral or adeno-associated viral vector, a piggyback vector, or a tol2 vector. In certain embodiments, the polynucleotide sequence may be a bicistronic expression construct. In further embodiments, the isolated polynucleotide sequence may be incorporated in a cellular genome. In yet further embodiments, the isolated polynucleotide sequence may be part of a cellular genome. In further embodiments, the isolated polynucleotide sequence may be comprised in an artificial chromosome. In certain embodiments, the 5′ and/or 3′ end of the isolated polynucleotide sequence may be modified to improve the stability of the sequence of actively avoid degradation. In certain embodiments, the isolated polynucleotide sequence may be comprised in a bacteriophage. In other embodiments, the isolated polynucleotide sequence may be contained in agrobacterium species. In certain embodiments, the isolated polynucleotide sequence is lyophilized.

### Codon Optimization

[0377] Aspects of the disclosure relate to polynucleotide molecules that encode one or more components of the systems as described in any of the embodiments herein, wherein at least one or more regions of the polynucleotide molecule may be codon optimized for expression in a eukaryotic cell. In certain embodiments, the polynucleotide molecules that encode one or more components of the systems as described in any of the embodiments herein are optimized for expression in a mammalian cell or a plant cell.

[0378] An example of a codon optimized sequence, is in this instance a sequence optimized for expression in a eukaryote, e.g., humans (i.e. being optimized for expression in humans), or for another eukaryote, animal or mammal as herein discussed; see, e.g., SaCas9 human codon optimized sequence in International Patent Publication No. WO 2014/093622 (PCT/US2013/074667) as an example of a codon optimized sequence (from knowledge in the art and this disclosure, codon optimizing coding nucleic acid molecule(s), especially as to effector protein is within the ambit of the skilled artisan). Whilst this is preferred, it will be appreciated that other examples are possible and codon optimization for a host species other than human, or for codon optimization for specific organs is known. In some embodiments, an enzyme coding sequence encoding a Cas protein and/or transposase is codon optimized for expression in particular cells, such as eukaryotic cells. The eukaryotic cells may be those of or derived from a particular organism, such as a plant or a mammal, including but not limited to human, or non-human eukaryote or animal or mammal as herein discussed, e.g., mouse, rat, rabbit, dog, livestock, or non-human mammal or primate. In some embodiments, processes for modifying the germ line genetic identity of human beings and/or processes for modifying the genetic identity of animals which are likely to cause them suffering without any substantial medical benefit to man or animal, and also animals resulting from such processes, may be excluded. In general, codon optimization refers to a process of modifying a nucleic acid sequence for enhanced expression in the host cells of interest by replacing at least one codon (e.g., about or more than about 1, 2, 3, 4, 5, 10, 15, 20, 25, 50, or more codons) of the native sequence with codons that are more frequently or most frequently used in the genes of that host cell while maintaining the native amino acid sequence.

[0379] Various species exhibit particular bias for certain codons of a particular amino acid. Codon bias (differences in codon usage between organisms) often correlates with the efficiency of translation of messenger RNA (mRNA), which is in turn believed to be dependent on, among other things, the properties of the codons being translated and the availability of particular transfer RNA (tRNA) molecules. The predominance of selected tRNAs in a cell is generally a reflection of the codons used most frequently in peptide synthesis. Accordingly, genes can be tailored for optimal gene expression in a given organism based on codon optimization. Codon usage tables are readily available, for example, at the “Codon Usage Database” available at www.kazusa.orjp/codon/and these tables can be adapted in a number of ways. See Nakamura, Y., et al. “Codon usage tabulated from the international DNA sequence databases: status for the year 2000” Nucl. Acids Res. 28:292 (2000). Computer algorithms for codon optimizing a particular sequence for expression in a particular host cell are also available, such as Gene Forge (Aptagen; Jacobus, PA), are also available. In some embodiments, one or more codons (e.g., 1, 2, 3, 4, 5, 10, 15, 20, 25, 50, or more, or all codons) in a sequence encoding a DNA/RNA-targeting Cas protein corresponds to the most frequently used codon for a particular amino acid.

### Method of Inserting Polynucleotides

[0380] The present disclosure further provides methods of inserting a polynucleotide into a target nucleic acid in a cell, which comprises introducing into a cell: (a) one or more transposases (e.g., CRISPR-associated transposases) or functional fragments thereof, (b) a nucleotide-binding molecule. In some examples, the present disclosure provides methods of inserting a donor polynucleotide into a target polynucleotide in a cell, the method comprises introducing to the cell: one or more CRISPR-associated Tn7 transposase polypeptides or functional fragments thereof; one or more Type I-B Cas proteins; and a guide molecule capable of complexing with the Type I-B Cas protein and directing binding of the guide-Cas protein complex to a target polynucleotide.

[0381] The one or more of components (a), (b) may be expressed from a nucleic acid operably linked to a regulatory sequence that is expressed in the cell. The one or more of components (a), (b) is introduced in a particle. The particle comprises a ribonucleoprotein (RNP). The cell is a prokaryotic cell. The cell is a eukaryotic cell. The cell is a mammalian cell, a cell of a non-human primate, or a human cell. The cell is a plant cell.

[0382] In some cases, the method of inserting a donor polynucleotide into a target polynucleotide in a cell, which comprises introducing into the cell: one or more transposases (e.g., CRISPR-associated transposases), a Cas protein; and a guide molecule capable of complexing with the Cas protein and directing sequence specific binding of the guide-Cas protein complex to a target sequence of the target nucleic acid. The one or more CRISPR-associated transposons may comprise one or more transposases and a donor polynucleotide to be inserted.

### Immune Orthogonal Orthologs

[0383] In some embodiments, when one or more components of the systems (e.g., transposases, nucleotide-binding molecules) herein need to be expressed or administered in a subject, immunogenicity of the components may be reduced by sequentially expressing or administering immune orthogonal orthologs of the components of the transposon complexes to the subject. As used herein, the term “immune orthogonal orthologs” refer to orthologous proteins that have similar or substantially the same function or activity but have no or low cross-reactivity with the immune response generated by one another. In some embodiments, sequential expression or administration of such orthologs elicits low or no secondary immune response. The immune orthogonal orthologs can avoid being neutralized by antibodies (e.g., existing antibodies in the host before the orthologs are expressed or administered). Cells expressing the orthologs can avoid being cleared by the host's immune system (e.g., by activated CTLs). In some examples, CRISPR enzyme orthologs from different species may be immune orthogonal orthologs.

[0384] Immune orthogonal orthologs may be identified by analyzing the sequences, structures, and/or immunogenicity of a set of candidates orthologs. In an example method, a set of immune orthogonal orthologs may be identified by a) comparing the sequences of a set of candidate orthologs (e.g., orthologs from different species) to identify a subset of candidates that have low or no sequence similarity; b) assessing immune overlap among the members of the subset of candidates to identify candidates that have no or low immune overlap. In some cases, immune overlap among candidates may be assessed by determining the binding (e.g., affinity) between a candidate ortholog and MHC (e.g., MHC type I and/or MHC II) of the host. Alternatively, or additionally, immune overlap among candidates may be assessed by determining B-cell epitopes for the candidate orthologs. In one example, immune orthogonal orthologs may be identified using the method described in Moreno A M et al., BioRxiv, published online Jan. 10, 2018, doi: doi.org/10.1101/245985.

### Delivery

[0385] The present disclosure also provides delivery systems for introducing components of the systems and compositions herein to cells, tissues, organs, or organisms. A delivery system may comprise one or more delivery vehicles and/or cargos. Exemplary delivery systems and methods include those described in paragraphs [00117] to [00278] of Feng Zhang et al., (WO2016106236A1), and pages 1241-1251 and Table 1 of Lino C A et al., Delivering CRISPR: a review of the challenges and approaches, DRUG DELIVERY, 2018, VOL. 25, NO. 1, 1234-1257, which are incorporated by reference herein in their entireties.

[0386] In some embodiments, the delivery systems may be used to introduce the components of the systems and compositions to plant cells. For example, the components may be delivered to plant using electroporation, microinjection, aerosol beam injection of plant cell protoplasts, biolistic methods, DNA particle bombardment, and/or Agrobacterium-mediated transformation. Examples of methods and delivery systems for plants include those described in Fu et al., Transgenic Res. 2000 February; 9(1):11-9; Klein R M, et al., Biotechnology. 1992; 24:384-6; Casas A M et al., Proc Natl Acad Sci USA. 1993 Dec. 1; 90(23): 11212-11216; and U.S. Pat. No. 5,563,055, Davey M R et al., Plant Mol Biol. 1989 September; 13(3):273-85, which are incorporated by reference herein in their entireties.

### Cargos

[0387] The delivery systems may comprise one or more cargos. The cargos may comprise one or more components of the systems and compositions herein. A cargo may comprise one or more of the following: i) a plasmid encoding one or more Cas proteins; ii) a plasmid encoding one or more guide RNAs, iii) mRNA of one or more Cas proteins; iv) one or more guide RNAs; v) one or more Cas proteins; vi) any combination thereof. In some examples, a cargo may comprise a plasmid encoding one or more Cas protein and one or more (e.g., a plurality of) guide RNAs. In some embodiments, a cargo may comprise mRNA encoding one or more Cas proteins and one or more guide RNAs.

[0388] In some examples, a cargo may comprise one or more Cas proteins and one or more guide RNAs, e.g., in the form of ribonucleoprotein complexes (RNP). The ribonucleoprotein complexes may be delivered by methods and systems herein. In some cases, the ribonucleoprotein may be delivered by way of a polypeptide-based shuttle agent. In one example, the ribonucleoprotein may be delivered using synthetic peptides comprising an endosome leakage domain (ELD) operably linked to a cell penetrating domain (CPD), to a histidine-rich domain and a CPD, e.g., as describe in WO2016161516. RNP may also be used for delivering the compositions and systems to plant cells, e.g., as described in Wu J W, et al., Nat Biotechnol. 2015 November; 33(11):1162-4.

### Physical Delivery

[0389] In some embodiments, the cargos may be introduced to cells by physical delivery methods. Examples of physical methods include microinjection, electroporation, and hydrodynamic delivery. Both nucleic acid and proteins may be delivered using such methods. For example, Cas protein may be prepared in vitro, isolated, (refolded, purified if needed), and introduced to cells.

### Microinjection

[0390] Microinjection of the cargo directly to cells can achieve high efficiency, e.g., above 90% or about 100%. In some embodiments, microinjection may be performed using a microscope and a needle (e.g., with 0.5-5.0 μm in diameter) to pierce a cell membrane and deliver the cargo directly to a target site within the cell. Microinjection may be used for in vitro and ex vivo delivery.

[0391] Plasmids comprising coding sequences for Cas proteins and/or guide RNAs, mRNAs, and/or guide RNAs, may be microinjected. In some cases, microinjection may be used i) to deliver DNA directly to a cell nucleus, and/or ii) to deliver mRNA (e.g., in vitro transcribed) to a cell nucleus or cytoplasm. In certain examples, microinjection may be used to delivery sgRNA directly to the nucleus and Cas-encoding mRNA to the cytoplasm, e.g., facilitating translation and shuttling of Cas to the nucleus.

[0392] Microinjection may be used to generate genetically modified animals. For example, gene editing cargos may be injected into zygotes to allow for efficient germline modification. Such approach can yield normal embryos and full-term mouse pups harboring the desired modification(s). Microinjection can also be used to provide transiently up- or down-regulate a specific gene within the genome of a cell, e.g., using CRISPRa and CRISPRi.

### Electroporation

[0393] In some embodiments, the cargos and/or delivery vehicles may be delivered by electroporation. Electroporation may use pulsed high-voltage electrical currents to transiently open nanometer-sized pores within the cellular membrane of cells suspended in buffer, allowing for components with hydrodynamic diameters of tens of nanometers to flow into the cell. In some cases, electroporation may be used on various cell types and efficiently transfer cargo into cells. Electroporation may be used for in vitro and ex vivo delivery.

[0394] Electroporation may also be used to deliver the cargo to into the nuclei of mammalian cells by applying specific voltage and reagents, e.g., by nucleofection. Such approaches include those described in Wu Y, et al. (2015). Cell Res 25:67-79; Ye L, et al. (2014). Proc Natl Acad Sci USA 111:9591-6; Choi P S, Meyerson M. (2014). Nat Commun 5:3728; Wang J, Quake S R. (2014). Proc Natl Acad Sci 111:13157-62. Electroporation may also be used to deliver the cargo in vivo, e.g., with methods described in Zuckermann M, et al. (2015). Nat Commun 6:7391.

### Hydrodynamic Delivery

[0395] Hydrodynamic delivery may also be used for delivering the cargos, e.g., for in vivo delivery. In some examples, hydrodynamic delivery may be performed by rapidly pushing a large volume (8-10% body weight) solution containing the gene editing cargo into the bloodstream of a subject (e.g., an animal or human), e.g., for mice, via the tail vein. As blood is incompressible, the large bolus of liquid may result in an increase in hydrodynamic pressure that temporarily enhances permeability into endothelial and parenchymal cells, allowing for cargo not normally capable of crossing a cellular membrane to pass into cells. This approach may be used for delivering naked DNA plasmids and proteins. The delivered cargos may be enriched in liver, kidney, lung, muscle, and/or heart.

### Transfection

[0396] The cargos, e.g., nucleic acids, may be introduced to cells by transfection methods for introducing nucleic acids into cells. Examples of transfection methods include calcium phosphate-mediated transfection, cationic transfection, liposome transfection, dendrimer transfection, heat shock transfection, magnetofection, lipofection, impalefection, optical transfection, proprietary agent-enhanced uptake of nucleic acid.

### Delivery Vehicles

[0397] The delivery systems may comprise one or more delivery vehicles. The delivery vehicles may deliver the cargo into cells, tissues, organs, or organisms (e.g., animals or plants). The cargos may be packaged, carried, or otherwise associated with the delivery vehicles. The delivery vehicles may be selected based on the types of cargo to be delivered, and/or the delivery is in vitro and/or in vivo. Examples of delivery vehicles include vectors, viruses, non-viral vehicles, and other delivery reagents described herein.

[0398] The delivery vehicles in accordance with the present invention may a greatest dimension (e.g., diameter) of less than 100 microns (μm). In some embodiments, the delivery vehicles have a greatest dimension of less than 10 μm. In some embodiments, the delivery vehicles may have a greatest dimension of less than 2000 nanometers (nm). In some embodiments, the delivery vehicles may have a greatest dimension of less than 1000 nanometers (nm). In some embodiments, the delivery vehicles may have a greatest dimension (e.g., diameter) of less than 900 nm, less than 800 nm, less than 700 nm, less than 600 nm, less than 500 nm, less than 400 nm, less than 300 nm, less than 200 nm, less than 150 nm, or less than 100 nm, less than 50 nm. In some embodiments, the delivery vehicles may have a greatest dimension ranging between 25 nm and 200 nm.

[0399] In some embodiments, the delivery vehicles may be or comprise particles. For example, the delivery vehicle may be or comprise nanoparticles (e.g., particles with a greatest dimension (e.g., diameter) no greater than 1000 nm. The particles may be provided in different forms, e.g., as solid particles (e.g., metal such as silver, gold, iron, titanium), non-metal, lipid-based solids, polymers), suspensions of particles, or combinations thereof. Metal, dielectric, and semiconductor particles may be prepared, as well as hybrid structures (e.g., core-shell particles). Nanoparticles may also be used to deliver the compositions and systems to plant cells, e.g., as described in WO 2008042156, US 20130185823, and WO2015089419.

### Vectors

[0400] The systems, compositions, and/or delivery systems may comprise one or more vectors. The present disclosure also include vector systems. A vector system may comprise one or more vectors. In some embodiments, a vector refers to a nucleic acid molecule capable of transporting another nucleic acid to which it has been linked. Vectors include nucleic acid molecules that are single-stranded, double-stranded, or partially double-stranded; nucleic acid molecules that comprise one or more free ends, no free ends (e.g., circular); nucleic acid molecules that comprise DNA, RNA, or both; and other varieties of polynucleotides known in the art. A vector may be a plasmid, e.g., a circular double stranded DNA loop into which additional DNA segments can be inserted, such as by standard molecular cloning techniques. Certain vectors may be capable of autonomous replication in a host cell into which they are introduced (e.g., bacterial vectors having a bacterial origin of replication and episomal mammalian vectors). Some vectors (e.g., non-episomal mammalian vectors) are integrated into the genome of a host cell upon introduction into the host cell, and thereby are replicated along with the host genome. In certain examples, vectors may be expression vectors, e.g., capable of directing the expression of genes to which they are operatively-linked. In some cases, the expression vectors may be for expression in eukaryotic cells. Common expression vectors of utility in recombinant DNA techniques are often in the form of plasmids.

[0401] Examples of vectors include pGEX, pMAL, pRIT5, E. coli expression vectors (e.g., pTrc, pET 11d, yeast expression vectors (e.g., pYepSec1, pMFa, pJRY88, pYES2, and picZ, Baculovirus vectors (e.g., for expression in insect cells such as SF9 cells) (e.g., pAc series and the pVL series), mammalian expression vectors (e.g., pCDM8 and pMT2PC.

[0402] A vector may comprise i) Cas encoding sequence(s), and/or ii) a single, or at least 2, at least 3, at least 4, at least 5, at least 6, at least 7, at least 8, at least 9, at least 10, at least 12, at least 14, at least 16, at least 32, at least 48, at least 50 guide RNA(s) encoding sequences. In a single vector there can be a promoter for each RNA coding sequence. Alternatively, or additionally, in a single vector, there may be a promoter controlling (e.g., driving transcription and/or expression) multiple RNA encoding sequences.

[0403] In some embodiments, the components (or coding sequences thereof) in a composition or system herein may be comprised in a single vector. For example, a single vector may comprise coding sequences for one or more CRISPR-associated Tn7 transposase polypeptides, one or more Cas proteins, and one more guide molecules. In certain embodiments, the components (or coding sequences thereof) in a composition or system herein may be comprised in separate vectors. In some examples, a first vector may comprise coding sequences for one or more CRISPR-associated Tn7 transposase polypeptides; a second vector may comprise coding sequences for one or more Cas proteins; a third vector may comprise coding sequences for one or more guide molecules. In some examples, a first vector may comprise coding sequences for one or more CRISPR-associated Tn7 transposase polypeptides and one or more Cas proteins; a second vector may comprise coding sequences for one or more guide molecules. In some examples, a first vector may comprise coding sequences for one or more CRISPR-associated Tn7 transposase polypeptides; a second vector may comprise coding sequences for one or more Cas proteins and one or more guide molecules. In some examples, a first vector may comprise coding sequences for one or more CRISPR-associated Tn7 transposase polypeptides and one or more guide molecules; a second vector may comprise coding sequences for one or more Cas proteins.

### Regulatory Elements

[0404] A vector may comprise one or more regulatory elements. The regulatory element(s) may be operably linked to coding sequences of Cas proteins, accessary proteins, guide RNAs (e.g., a single guide RNA, crRNA, and/or tracrRNA), or combination thereof. The term “operably linked” is intended to mean that the nucleotide sequence of interest is linked to the regulatory element(s) in a manner that allows for expression of the nucleotide sequence (e.g., in an in vitro transcription/translation system or in a host cell when the vector is introduced into the host cell). In certain examples, a vector may comprise: a first regulatory element operably linked to a nucleotide sequence encoding a Cas protein, and a second regulatory element operably linked to a nucleotide sequence encoding a guide RNA.

[0405] Examples of regulatory elements include promoters, enhancers, internal ribosomal entry sites (IRES), and other expression control elements (e.g., transcription termination signals, such as polyadenylation signals and poly-U sequences). Such regulatory elements are described, for example, in Goeddel, GENE EXPRESSION TECHNOLOGY: METHODS IN ENZYMOLOGY 185, Academic Press, San Diego, Calif (1990). Regulatory elements include those that direct constitutive expression of a nucleotide sequence in many types of host cell and those that direct expression of the nucleotide sequence only in certain host cells (e.g., tissue-specific regulatory sequences). A tissue-specific promoter may direct expression primarily in a desired tissue of interest, such as muscle, neuron, bone, skin, blood, specific organs (e.g., liver, pancreas), or particular cell types (e.g., lymphocytes). Regulatory elements may also direct expression in a temporal-dependent manner, such as in a cell-cycle dependent or developmental stage-dependent manner, which may or may not also be tissue or cell-type specific.

[0406] Examples of promoters include one or more pol III promoter (e.g., 1, 2, 3, 4, 5, or more pol III promoters), one or more pol II promoters (e.g., 1, 2, 3, 4, 5, or more pol II promoters), one or more pol I promoters (e.g., 1, 2, 3, 4, 5, or more pol I promoters), or combinations thereof. Examples of pol III promoters include, but are not limited to, U6 and H1 promoters. Examples of pol II promoters include, but are not limited to, the retroviral Rous sarcoma virus (RSV) LTR promoter (optionally with the RSV enhancer), the cytomegalovirus (CMV) promoter (optionally with the CMV enhancer), the SV40 promoter, the dihydrofolate reductase promoter, the β-actin promoter, the phosphoglycerol kinase (PGK) promoter, and the EF1α promoter.

### Viral Vectors

[0407] The cargos may be delivered by viruses. In some embodiments, viral vectors are used. A viral vector may comprise virally-derived DNA or RNA sequences for packaging into a virus (e.g., retroviruses, replication defective retroviruses, adenoviruses, replication defective adenoviruses, and adeno-associated viruses). Viral vectors also include polynucleotides carried by a virus for transfection into a host cell. Viruses and viral vectors may be used for in vitro, ex vivo, and/or in vivo deliveries.

### Adeno Associated Virus (AAV)

[0408] The systems and compositions herein may be delivered by adeno associated virus (AAV). AAV vectors may be used for such delivery. AAV, of the Dependovirus genus and Parvoviridae family, is a single stranded DNA virus. In some embodiments, AAV may provide a persistent source of the provided DNA, as AAV delivered genomic material can exist indefinitely in cells, e.g., either as exogenous DNA or, with some modification, be directly integrated into the host DNA. In some embodiments, AAV do not cause or relate with any diseases in humans. The virus itself is able to efficiently infect cells while provoking little to no innate or adaptive immune response or associated toxicity.

[0409] Examples of AAV that can be used herein include AAV-1, AAV-2, AAV-3, AAV-4, AAV-5, AAV-6, AAV-8, and AAV-9. The type of AAV may be selected with regard to the cells to be targeted; e.g., one can select AAV serotypes 1, 2, 5 or a hybrid capsid AAV1, AAV2, AAV5 or any combination thereof for targeting brain or neuronal cells; and one can select AAV4 for targeting cardiac tissue. AAV8 is useful for delivery to the liver. AAV-2-based vectors were originally proposed for CFTR delivery to CF airways, other serotypes such as AAV-1, AAV-5, AAV-6, and AAV-9 exhibit improved gene transfer efficiency in a variety of models of the lung epithelium. Examples of cell types targeted by AAV are described in Grimm, D. et al, J. Virol. 82: 5887-5911 (2008)), and shown as follows:

TABLE 3

| Cell Line | AAV-1 | AAV-2 | AAV-3 | AAV-4 | AAV-5 | AAV-6 | AAV-8 | AAV-9 |
|---|---|---|---|---|---|---|---|---|
| Huh-7 | 13 | 100 | 2.5 | 0.0 | 0.1 | 10 | 0.7 | 0.0 |
| HEK293 | 25 | 100 | 2.5 | 0.1 | 0.1 | 5 | 0.7 | 0.1 |
| HeLa | 3 | 100 | 2.0 | 0.1 | 6.7 | 1 | 0.2 | 0.1 |
| HepG2 | 3 | 100 | 16.7 | 0.3 | 1.7 | 5 | 0.3 | ND |
| Hep1A | 20 | 100 | 0.2 | 1.0 | 0.1 | 1 | 0.2 | 0.0 |
| 911 | 17 | 100 | 11 | 0.2 | 0.1 | 17 | 0.1 | ND |
| CHO | 100 | 100 | 14 | 1.4 | 333 | 50 | 10 | 1.0 |
| COS | 33 | 100 | 33 | 3.3 | 5.0 | 14 | 2.0 | 0.5 |
| MeWo | 10 | 100 | 20 | 0.3 | 6.7 | 10 | 1.0 | 0.2 |
| NIH3T3 | 10 | 100 | 2.9 | 2.9 | 0.3 | 10 | 0.3 | ND |
| A549 | 14 | 100 | 20 | ND | 0.5 | 10 | 0.5 | 0.1 |
| HT1180 | 20 | 100 | 10 | 0.1 | 0.3 | 33 | 0.5 | 0.1 |
| Monocytes | 1111 | 100 | ND | ND | 125 | 1429 | ND | ND |
| Immature DC | 2500 | 100 | ND | ND | 222 | 2857 | ND | ND |
| Mature DC | 2222 | 100 | ND | ND | 333 | 3333 | ND | ND |

[0410] AAV particles may be created in HEK 293 T cells. Once particles with specific tropism have been created, they are used to infect the target cell line much in the same way that native viral particles do. This may allow for persistent presence of CRISPR-Cas components in the infected cell type, and what makes this version of delivery particularly suited to cases where long-term expression is desirable. Examples of doses and formulations for AAV that can be used include those describe in U.S. Pat. Nos. 8,454,972 and 8,404,658.

[0411] Various strategies may be used for delivery the systems and compositions herein with AAVs. In some examples, coding sequences of Cas and gRNA may be packaged directly onto one DNA plasmid vector and delivered via one AAV particle. In some examples, AAVs may be used to deliver gRNAs into cells that have been previously engineered to express Cas. In some examples, coding sequences of Cas and gRNA may be made into two separate AAV particles, which are used for co-transfection of target cells. In some examples, markers, tags, and other sequences may be packaged in the same AAV particles as coding sequences of Cas and/or gRNAs.

### Lentiviruses

[0412] The systems and compositions herein may be delivered by lentiviruses. Lentiviral vectors may be used for such delivery. Lentiviruses are complex retroviruses that have the ability to infect and express their genes in both mitotic and post-mitotic cells.

[0413] Examples of lentiviruses include human immunodeficiency virus (HIV), which may use its envelope glycoproteins of other viruses to target a broad range of cell types; minimal non-primate lentiviral vectors based on the equine infectious anemia virus (EIAV), which may be used for ocular therapies. In certain embodiments, self-inactivating lentiviral vectors with an siRNA targeting a common exon shared by HIV tat/rev, a nucleolar-localizing TAR decoy, and an anti-CCR5-specific hammerhead ribozyme (see, e.g., DiGiusto et al. (2010) Sci Transl Med 2:36ra43) may be used/and or adapted to the nucleic acid-targeting system herein.

[0414] Lentiviruses may be pseudo-typed with other viral proteins, such as the G protein of vesicular stomatitis virus. In doing so, the cellular tropism of the lentiviruses can be altered to be as broad or narrow as desired. In some cases, to improve safety, second- and third-generation lentiviral systems may split essential genes across three plasmids, which may reduce the likelihood of accidental reconstitution of viable viral particles within cells.

[0415] In some examples, leveraging the integration ability, lentiviruses may be used to create libraries of cells comprising various genetic modifications, e.g., for screening and/or studying genes and signaling pathways.

### Adenoviruses

[0416] The systems and compositions herein may be delivered by adenoviruses. Adenoviral vectors may be used for such delivery. Adenoviruses include nonenveloped viruses with an icosahedral nucleocapsid containing a double stranded DNA genome. Adenoviruses may infect dividing and non-dividing cells. In some embodiments, adenoviruses do not integrate into the genome of host cells, which may be used for limiting off-target effects of CRISPR-Cas systems in gene editing applications.

### Viral Vehicles for Delivery to Plants

[0417] The systems and compositions may be delivered to plant cells using viral vehicles. In particular embodiments, the compositions and systems may be introduced in the plant cells using a plant viral vector (e.g., as described in Scholthof et al. 1996, Annu Rev Phytopathol. 1996; 34:299-323). Such viral vector may be a vector from a DNA virus, e.g., geminivirus (e.g., cabbage leaf curl virus, bean yellow dwarf virus, wheat dwarf virus, tomato leaf curl virus, maize streak virus, tobacco leaf curl virus, or tomato golden mosaic virus) or nanovirus (e.g., Faba bean necrotic yellow virus). The viral vector may be a vector from an RNA virus, e.g., tobravirus (e.g., tobacco rattle virus, tobacco mosaic virus), potexvirus (e.g., potato virus X), or hordeivirus (e.g., barley stripe mosaic virus). The replicating genomes of plant viruses may be non-integrative vectors.

### Non-Viral Vehicles

[0418] The delivery vehicles may comprise non-viral vehicles. In general, methods and vehicles capable of delivering nucleic acids and/or proteins may be used for delivering the systems compositions herein. Examples of non-viral vehicles include lipid nanoparticles, cell-penetrating peptides (CPPs), DNA nanoclews, gold nanoparticles, streptolysin O, multifunctional envelope-type nanodevices (MENDs), lipid-coated mesoporous silica particles, and other inorganic nanoparticles.

### Lipid Particles

[0419] The delivery vehicles may comprise lipid particles, e.g., lipid nanoparticles (LNPs) and liposomes.

### Lipid Nanoparticles (LNPs)

[0420] LNPs may encapsulate nucleic acids within cationic lipid particles (e.g., liposomes), and may be delivered to cells with relative ease. In some examples, lipid nanoparticles do not contain any viral components, which helps minimize safety and immunogenicity concerns. Lipid particles may be used for in vitro, ex vivo, and in vivo deliveries. Lipid particles may be used for various scales of cell populations.

[0421] In some examples. LNPs may be used for delivering DNA molecules (e.g., those comprising coding sequences of Cas and/or gRNA) and/or RNA molecules (e.g., mRNA of Cas, gRNAs). In certain cases, LNPs may be use for delivering RNP complexes of Cas/gRNA.

[0422] Components in LNPs may comprise cationic lipids 1,2-dilineoyl-3-dimethylammonium-propane (DLinDAP), 1,2-dilinoleyloxy-3-N,N-dimethylaminopropane (DLinDMA), 1,2-dilinoleyloxyketo-N,N-dimethyl-3-aminopropane (DLinK-DMA), 1,2-dilinoleyl-4-(2-dimethylaminoethyl)-[1,3]-dioxolane (DLinKC2-DMA), (3-o-[2″-(methoxypolyethyleneglycol 2000) succinoyl]-1,2-dimyristoyl-sn-glycol (PEG-S-DMG), R-3-[(ro-methoxy-poly(ethylene glycol)2000) carbamoyl]-1,2-dimyristyloxlpropyl-3-amine (PEG-C-DOMG, and any combination thereof. Preparation of LNPs and encapsulation may be adapted from Rosin et al, Molecular Therapy, vol. 19, no. 12, pages 1286-2200, December 2011).

### Liposomes

[0423] In some embodiments, a lipid particle may be liposome. Liposomes are spherical vesicle structures composed of a uni- or multilamellar lipid bilayer surrounding internal aqueous compartments and a relatively impermeable outer lipophilic phospholipid bilayer. In some embodiments, liposomes are biocompatible, nontoxic, can deliver both hydrophilic and lipophilic drug molecules, protect their cargo from degradation by plasma enzymes, and transport their load across biological membranes and the blood brain barrier (BBB).

[0424] Liposomes can be made from several different types of lipids, e.g., phospholipids. A liposome may comprise natural phospholipids and lipids such as 1,2-distearoryl-sn-glycero-3-phosphatidyl choline (DSPC), sphingomyelin, egg phosphatidylcholines, monosialoganglioside, or any combination thereof.

[0425] Several other additives may be added to liposomes in order to modify their structure and properties. For instance, liposomes may further comprise cholesterol, sphingomyelin, and/or 1,2-dioleoyl-sn-glycero-3-phosphoethanolamine (DOPE), e.g., to increase stability and/or to prevent the leakage of the liposomal inner cargo.

### Stable Nucleic-Acid-Lipid Particles (SNALPs)

[0426] In some embodiments, the lipid particles may be stable nucleic acid lipid particles (SNALPs). SNALPs may comprise an ionizable lipid (DLinDMA) (e.g., cationic at low pH), a neutral helper lipid, cholesterol, a diffusible polyethylene glycol (PEG)-lipid, or any combination thereof. In some examples, SNALPs may comprise synthetic cholesterol, dipalmitoylphosphatidylcholine, 3-N-[(w-methoxy polyethylene glycol)2000)carbamoyl]-1,2-dimyrestyloxypropylamine, and cationic 1,2-dilinoleyloxy-3-N,Ndimethylaminopropane. In some examples, SNALPs may comprise synthetic cholesterol, 1,2-distearoyl-sn-glycero-3-phosphocholine, PEG-cDMA, and 1,2-dilinoleyloxy-3-(N;N-dimethyl)aminopropane (DLinDMA)

### Other Lipids

[0427] The lipid particles may also comprise one or more other types of lipids, e.g., cationic lipids, such as amino lipid 2,2-dilinoleyl-4-dimethylaminoethyl-[1,3]-dioxolane (DLin-KC2-DMA), DLin-KC2-DMA4, C12-200 and colipids disteroylphosphatidyl choline, cholesterol, and PEG-DMG.

### Lipoplexes/Polyplexes

[0428] In some embodiments, the delivery vehicles comprise lipoplexes and/or polyplexes. Lipoplexes may bind to negatively charged cell membrane and induce endocytosis into the cells. Examples of lipoplexes may be complexes comprising lipid(s) and non-lipid components. Examples of lipoplexes and polyplexes include FuGENE-6 reagent, a non-liposomal solution containing lipids and other components, zwitterionic amino lipids (ZALs), Ca2 [symbol] (e.g., forming DNA/Ca²⁺ microcomplexes), polyethenimine (PEI) (e.g., branched PEI), and poly(L-lysine) (PLL).

### Cell Penetrating Peptides

[0429] In some embodiments, the delivery vehicles comprise cell penetrating peptides (CPPs). CPPs are short peptides that facilitate cellular uptake of various molecular cargo (e.g., from nanosized particles to small chemical molecules and large fragments of DNA).

[0430] CPPs may be of different sizes, amino acid sequences, and charges. In some examples, CPPs can translocate the plasma membrane and facilitate the delivery of various molecular cargoes to the cytoplasm or an organelle. CPPs may be introduced into cells via different mechanisms, e.g., direct penetration in the membrane, endocytosis-mediated entry, and translocation through the formation of a transitory structure.

[0431] CPPs may have an amino acid composition that either contains a high relative abundance of positively charged amino acids such as lysine or arginine or has sequences that contain an alternating pattern of polar/charged amino acids and non-polar, hydrophobic amino acids. These two types of structures are referred to as polycationic or amphipathic, respectively. A third class of CPPs are the hydrophobic peptides, containing only apolar residues, with low net charge or have hydrophobic amino acid groups that are crucial for cellular uptake. Another type of CPPs is the trans-activating transcriptional activator (Tat) from Human Immunodeficiency Virus 1 (HIV-1). Examples of CPPs include to Penetratin, Tat (48-60), Transportan, and (R-AhX-R4) (Ahx refers to aminohexanoyl), Kaposi fibroblast growth factor (FGF) signal peptide sequence, integrin 33 signal peptide sequence, polyarginine peptide Args sequence, Guanine rich-molecular transporters, and sweet arrow peptide. Examples of CPPs and related applications also include those described in U.S. Pat. No. 8,372,951.

[0432] CPPs can be used for in vitro and ex vivo work quite readily, and extensive optimization for each cargo and cell type is usually required. In some examples, CPPs may be covalently attached to the Cas protein directly, which is then complexed with the gRNA and delivered to cells. In some examples, separate delivery of CPP-Cas and CPP-gRNA to multiple cells may be performed. CPP may also be used to delivery RNPs.

[0433] CPPs may be used to deliver the compositions and systems to plants. In some examples, CPPs may be used to deliver the components to plant protoplasts, which are then regenerated to plant cells and further to plants.

### DNA Nanoclews

[0434] In some embodiments, the delivery vehicles comprise DNA nanoclews. A DNA nanoclew refers to a sphere-like structure of DNA (e.g., with a shape of a ball of yarn). The nanoclew may be synthesized by rolling circle amplification with palindromic sequences that aide in the self-assembly of the structure. The sphere may then be loaded with a payload. An example of DNA nanoclew is described in Sun W et al, J Am Chem Soc. 2014 Oct. 22; 136(42):14722-5; and Sun W et al, Angew Chem Int Ed Engl. 2015 Oct. 5; 54(41):12029-33. DNA nanoclew may have a palindromic sequences to be partially complementary to the gRNA within the Cas:gRNA ribonucleoprotein complex. A DNA nanoclew may be coated, e.g., coated with PEI to induce endosomal escape.

### Gold Nanoparticles

[0435] In some embodiments, the delivery vehicles comprise gold nanoparticles (also referred to AuNPs or colloidal gold). Gold nanoparticles may form complex with cargos, e.g., Cas:gRNA RNP. Gold nanoparticles may be coated, e.g., coated in a silicate and an endosomal disruptive polymer, PAsp(DET). Examples of gold nanoparticles include AuraSense Therapeutics' Spherical Nucleic Acid (SNA™) constructs, and those described in Mout R, et al. (2017). ACS Nano 11:2452-8; Lee K, et al. (2017). Nat Biomed Eng 1:889-901.

iTOP

[0436] In some embodiments, the delivery vehicles comprise iTOP. iTOP refers to a combination of small molecules drives the highly efficient intracellular delivery of native proteins, independent of any transduction peptide. iTOP may be used for induced transduction by osmocytosis and propanebetaine, using NaCl-mediated hyperosmolality together with a transduction compound (propanebetaine) to trigger macropinocytotic uptake into cells of extracellular macromolecules. Examples of iTOP methods and reagents include those described in D'Astolfo D S, Pagliero R J, Pras A, et al. (2015). Cell 161:674-690.

### Polymer-Based Particles

[0437] In some embodiments, the delivery vehicles may comprise polymer-based particles (e.g., nanoparticles). In some embodiments, the polymer-based particles may mimic a viral mechanism of membrane fusion. The polymer-based particles may be a synthetic copy of Influenza virus machinery and form transfection complexes with various types of nucleic acids ((siRNA, miRNA, plasmid DNA or shRNA, mRNA) that cells take up via the endocytosis pathway, a process that involves the formation of an acidic compartment. The low pH in late endosomes acts as a chemical switch that renders the particle surface hydrophobic and facilitates membrane crossing. Once in the cytosol, the particle releases its payload for cellular action. This Active Endosome Escape technology is safe and maximizes transfection efficiency as it is using a natural uptake pathway. In some embodiments, the polymer-based particles may comprise alkylated and carboxyalkylated branched polyethylenimine. In some examples, the polymer-based particles are VIROMER, e.g., VIROMER RNAi, VIROMER RED, VIROMER mRNA, VIROMER CRISPR. Example methods of delivering the systems and compositions herein include those described in Bawage S S et al., Synthetic mRNA expressed Cas13a mitigates RNA virus infections, www.biorxiv.org/content/10.1101/370460v1.full doi: doi.org/10.1101/370460, Viromer® RED, a powerful tool for transfection of keratinocytes. doi: 10.13140/RG.2.2.16993.61281, Viromer® Transfection—Factbook 2018: technology, product overview, users' data., doi:10.13140/RG.2.2.23912.16642.

### Streptolysin O (SLO)

[0438] The delivery vehicles may be streptolysin O (SLO). SLO is a toxin produced by Group A streptococci that works by creating pores in mammalian cell membranes. SLO may act in a reversible manner, which allows for the delivery of proteins (e.g., up to 100 kDa) to the cytosol of cells without compromising overall viability. Examples of SLO include those described in Sierig G, et al. (2003). Infect Immun 71:446-55; Walev I, et al. (2001). Proc Natl Acad Sci USA 98:3185-90; Teng K W, et al. (2017). Elife 6:e25460.

### Multifunctional Envelope-Type Nanodevice (MEND)

[0439] The delivery vehicles may comprise multifunctional envelope-type nanodevice (MENDs). MENDs may comprise condensed plasmid DNA, a PLL core, and a lipid film shell. A MEND may further comprise cell-penetrating peptide (e.g., stearyl octaarginine). The cell penetrating peptide may be in the lipid shell. The lipid envelope may be modified with one or more functional components, e.g., one or more of: polyethylene glycol (e.g., to increase vascular circulation time), ligands for targeting of specific tissues/cells, additional cell-penetrating peptides (e.g., for greater cellular delivery), lipids to enhance endosomal escape, and nuclear delivery tags. In some examples, the MEND may be a tetra-lamellar MEND (T-MEND), which may target the cellular nucleus and mitochondria. In certain examples, a MEND may be a PEG-peptide-DOPE-conjugated MEND (PPD-MEND), which may target bladder cancer cells. Examples of MENDs include those described in Kogure K, et al. (2004). J Control Release 98:317-23; Nakamura T, et al. (2012). Acc Chem Res 45:1113-21.

### Lipid-Coated Mesoporous Silica Particles

[0440] The delivery vehicles may comprise lipid-coated mesoporous silica particles. Lipid-coated mesoporous silica particles may comprise a mesoporous silica nanoparticle core and a lipid membrane shell. The silica core may have a large internal surface area, leading to high cargo loading capacities. In some embodiments, pore sizes, pore chemistry, and overall particle sizes may be modified for loading different types of cargos. The lipid coating of the particle may also be modified to maximize cargo loading, increase circulation times, and provide precise targeting and cargo release. Examples of lipid-coated mesoporous silica particles include those described in Du X, et al. (2014). Biomaterials 35:5580-90; Durfee P N, et al. (2016). ACS Nano 10:8325-45.

### Inorganic Nanoparticles

[0441] The delivery vehicles may comprise inorganic nanoparticles. Examples of inorganic nanoparticles include carbon nanotubes (CNTs) (e.g., as described in Bates K and Kostarelos K. (2013). Adv Drug Deliv Rev 65:2023-33.), bare mesoporous silica nanoparticles (MSNPs) (e.g., as described in Luo G F, et al. (2014). Sci Rep 4:6064), and dense silica nanoparticles (SiNPs) (as described in Luo D and Saltzman W M. (2000). Nat Biotechnol 18:893-5).

### Exosomes

[0442] The delivery vehicles may comprise exosomes. Exosomes include membrane bound extracellular vesicles, which can be used to contain and delivery various types of biomolecules, such as proteins, carbohydrates, lipids, and nucleic acids, and complexes thereof (e.g., RNPs). Examples of exosomes include those described in Schroeder A, et al., J Intern Med. 2010 January; 267(1):9-21; El-Andaloussi S, et al., Nat Protoc. 2012 December; 7(12):2112-26; Uno Y, et al., Hum Gene Ther. 2011 June; 22(6):711-9; Zou W, et al., Hum Gene Ther. 2011 April; 22(4):465-75.

[0443] In some examples, the exosome may form a complex (e.g., by binding directly or indirectly) to one or more components of the cargo. In certain examples, a molecule of an exosome may be fused with first adapter protein and a component of the cargo may be fused with a second adapter protein. The first and the second adapter protein may specifically bind each other, thus associating the cargo with the exosome. Examples of such exosomes include those described in Ye Y, et al., Biomater Sci. 2020 Apr. 28. doi: 10.1039/d0bm00427h.

### Applications in General

[0444] The compositions, systems, and methods herein may be used for various applications. In general, one or more target polynucleotides may be modified using the compositions, systems, and methods. In some embodiments, the compositions, systems, and methods may be used to generate engineered cells comprising such modified polynucleotide(s). Tissues, organs, organisms, cell lines, compositions (e.g., pharmaceutical compositions), and devices comprising such engineered cell(s) may be generated as well. The engineered cells, tissues, organs, organisms, cell lines, compositions (e.g., pharmaceutical compositions), and devices may be used as a therapeutic (to treat a disease) and/or a diagnostic, produce a biological product, generate a model organism, etc.

[0445] In some embodiments, biological products may be obtained from engineered cells, tissues, organs, organisms, cell lines. The biological products may be chemical compounds, nucleic acids, proteins, lipids, carbohydrates, or any combination thereof. In some examples, the biological products may be proteins. In some examples, the biological products may be RNA. In some examples, the biological products may be DNA. The proteins, RNA, and/or DNA of the biological products may be naturally occurring or non-naturally occurring, e.g., comprising one or more mutations. The product may be a mutated protein or product provided by a template.

[0446] In some embodiments, the present disclosure provides cells comprising one or more components of the systems herein. The cells may be engineered cells. The cells may be produced using the systems. The present disclosure includes cell lines comprising the engineered cell and/or progeny thereof. The present disclosure includes a plant or animal model comprising the engineered cell and/or progeny thereof. The present disclosure includes a composition comprising the engineered cell. The compositions may be formulated for us as a therapeutic. The cell or progeny thereof may be isolated (e.g., in isolated forms). The cell may comprise a mutation in a protein expressed from a gene comprising the target sequence. The cell may comprise deletion of a genomic region comprising the target sequence. The cell may comprise integration of an exogenous sequence by homology-directed repair. The cell may comprise decreased transcription of a gene associated with the target sequence. The cell may comprise increased transcription of a gene associated with the target sequence. In some cases, a donor polynucleotide may be inserted into to a target polynucleotide in a cell. The insertion of the donor polynucleotide into the target polynucleotide in the cell results in: a) a cell or population of cells comprising altered expression levels of one or more gene products; and/or b) a cell or population of cells that produces and/or secrete an endogenous or non-endogenous biological product or chemical compound.

[0447] The present disclosure includes pharmaceutical compositions for treatment of a disease or disorder, comprising the cell or progeny thereof. The treatment may result in genetic changes in one or more cells. The treatment may result in correction of one or more defective genotypes. The treatment may result in improved phenotype.

### Synthetic Biology Applications

[0448] The compositions, systems, and methods herein have a wide utility, including in clinical applications. It is envisaged that the programmable polynucleotide targeting systems can be used fused to split proteins of toxic domains for targeted cell death, for instance using cancer-linked RNA as target transcript. Further, pathways involving protein-protein interaction can be influenced in synthetic biological systems with e.g. fusion complexes with the appropriate effectors such as kinases or other enzymes.

[0449] The present disclosure expands the reach of synthetic biology by targeting specific diagnostic and therapeutic applications through improvements in genetic circuitry and higher level genetic circuit delivery enhancements.

[0450] Provided herein are methods and compositions having industrial, clinical, and other technological utility. Like all engineering-oriented disciplines, provided herein are modularized, flexible platforms that can be tuned for diverse applications. The highly modular and programmable nature of the compositions, systems, and methods herein can be used as a platform technology in synthetic biology. For example, in alternative embodiments, split enzymes are fused to Cas proteins whose activity is reconstituted upon binding to a target polynucleotide such as complementation of split death-inducing proteins after detection of a cancer-linked RNA or DNA. In alternative embodiments, pathways involving successive protein/protein interactions are re-engineered by using RNA or DNA to scaffold interactions among exemplary Cas fusion proteins as provided herein. In alternative embodiments, scaffold proteins as provided herein can bind kinases and their substrates to strongly influence the output of a signaling pathway, and exemplary Cas polypeptides are used in the scaffolding of protein/protein interactions to control signaling in a gene expression-dependent manner. Another group used tethering of enzymes involved in the production of the drug precursor mevalonate, thereby increasing production of this small molecule (Dueber J E, Wu G C, Malmirchegini G R, Moon T S, et al. 2009. Synthetic protein scaffolds provide modular control over metabolic flux. Nat Biotechnol 27: 753-9). In principle, strong co-binding of exemplary Cas fusion proteins on a target RNA provides a new level of control over successive protein interactions or shuttling of metabolites.

[0451] The emerging field of synthetic biology has produced toolbox of genetic regulatory systems that can be applied in basic research and for therapeutic applications. Synthetic biology strategies can create opportunities to change basic research approaches and improve therapeutic treatments for treating injuries and diseases. The complexity of cell signaling networks can be simplified by considering genetic networks composed of subsets of simpler parts, or modules. This simplification is the foundation of synthetic biology, where engineering paradigms are applied in rational and systematic ways to produce predictable and robust systems for understanding or controlling cellular function. This approach entails reprogramming cells to perform in predictable ways. Towards this end, genetic circuits have been built out of DNA and RNA that enable cells to perform Boolean logic functions ranging from memory, and mathematical computations to higher-order cellular functions like cancer cell identification, controlling T cell populations, and reporting on the microenvironment. The engineered gene circuits underlying these functions include genetic switches, oscillators, digital logic gates, and cell counters and have been designed to regulate gene expression in dynamic and predictable ways. While the majority of work in synthetic biology has been in simple organisms such as yeast and bacteria, however, the therapeutic potential of cells carrying engineered genetic circuits has spurred interest in using synthetic biology to remediate or control human disease. This is in part based upon the premise that effective cell therapies require precise temporal and spatial regulation of gene expression, which can be easily controlled by using genetic circuits.

[0452] Approaches in synthetic biology as disclosed herein can be used to reprogram cells with genetic circuits to probe the CNS during the onset and progression of neurodegenerative diseases. Such an approach will enable a better understanding of the interactions between neuroinflammation and neurodegeneration that will have a major impact on the broad range of neurological disorders.

### Applications in Plants and Fungi

[0453] The compositions, systems, and methods described herein can be used to perform gene or genome interrogation or editing or manipulation in plants and fungi. For example, the applications include investigation and/or selection and/or interrogations and/or comparison and/or manipulations and/or transformation of plant genes or genomes; e.g., to create, identify, develop, optimize, or confer trait(s) or characteristic(s) to plant(s) or to transform a plant or fugus genome. There can accordingly be improved production of plants, new plants with new combinations of traits or characteristics or new plants with enhanced traits. The compositions, systems, and methods can be used with regard to plants in Site-Directed Integration (SDI) or Gene Editing (GE) or any Near Reverse Breeding (NRB) or Reverse Breeding (RB) techniques.

[0454] The compositions, systems, and methods herein may be used to confer desired traits (e.g., enhanced nutritional quality, increased resistance to diseases and resistance to biotic and abiotic stress, and increased production of commercially valuable plant products or heterologous compounds) on essentially any plants and fungi, and their cells and tissues. The compositions, systems, and methods may be used to modify endogenous genes or to modify their expression without the permanent introduction into the genome of any foreign gene.

[0455] In some embodiments, compositions, systems, and methods may be used in genome editing in plants or where RNAi or similar genome editing techniques have been used previously; see, e.g., Nekrasov, “Plant genome editing made easy: targeted mutagenesis in model and crop plants using the CRISPR-Cas system,” Plant Methods 2013, 9:39 (doi:10.1186/1746-4811-9-39); Brooks, “Efficient gene editing in tomato in the first generation using the CRISPR-Cas9 system,” Plant Physiology September 2014 pp 114.247577; Shan, “Targeted genome modification of crop plants using a CRISPR-Cas system,” Nature Biotechnology 31, 686-688 (2013); Feng, “Efficient genome editing in plants using a CRISPR/Cas system,” Cell Research (2013) 23:1229-1232. doi:10.1038/cr.2013.114; published online 20 Aug. 2013; Xie, “RNA-guided genome editing in plants using a CRISPR-Cas system,” Mol Plant. 2013 November; 6(6):1975-83. doi: 10.1093/mp/sstl 19. Epub 2013 Aug. 17; Xu, “Gene targeting using the Agrobacterium tumefaciens-mediated CRISPR-Cas system in rice,” Rice 2014, 7:5 (2014), Zhou et al., “Exploiting SNPs for biallelic CRISPR mutations in the outcrossing woody perennial Populus reveals 4-coumarate: CoA ligase specificity and Redundancy,” New Phytologist (2015) (Forum) 1-4 (available online only at www.newphytologist.com); Caliando et al, “Targeted DNA degradation using a CRISPR device stably carried in the host genome, NATURE COMMUNICATIONS 6:6989, DOI: 10.1038/ncomms7989, www.nature.com/naturecommunications DOI: 10.1038/ncomms7989; U.S. Pat. No. 6,603,061 —Agrobacterium-Mediated Plant Transformation Method; U.S. Pat. No. 7,868,149—Plant Genome Sequences and Uses Thereof and US 2009/0100536—Transgenic Plants with Enhanced Agronomic Traits, Morrell et al “Crop genomics: advances and applications,” Nat Rev Genet. 2011 Dec. 29; 13(2):85-96, all the contents and disclosure of each of which are herein incorporated by reference in their entirety. Aspects of utilizing the compositions, systems, and methods may be analogous to the use of the CRISPR-Cas (e.g. CRISPR-Cas9) system in plants, and mention is made of the University of Arizona website “CRISPR-PLANT” (www.genome.arizona.edu/crispr/) (supported by Penn State and AGI).

[0456] The compositions, systems, and methods may also be used on protoplasts. A “protoplast” refers to a plant cell that has had its protective cell wall completely or partially removed using, for example, mechanical or enzymatic means resulting in an intact biochemical competent unit of living plant that can reform their cell wall, proliferate and regenerate grow into a whole plant under proper growing conditions.

[0457] The compositions, systems, and methods may be used for screening genes (e.g., endogenous, mutations) of interest. In some examples, genes of interest include those encoding enzymes involved in the production of a component of added nutritional value or generally genes affecting agronomic traits of interest, across species, phyla, and plant kingdom. By selectively targeting e.g. genes encoding enzymes of metabolic pathways, the genes responsible for certain nutritional aspects of a plant can be identified. Similarly, by selectively targeting genes which may affect a desirable agronomic trait, the relevant genes can be identified. Accordingly, the present invention encompasses screening methods for genes encoding enzymes involved in the production of compounds with a particular nutritional value and/or agronomic traits.

[0458] It is also understood that reference herein to animal cells may also apply, mutatis mutandis, to plant or fungal cells unless otherwise apparent; and, the enzymes herein having reduced off-target effects and systems employing such enzymes can be used in plant applications, including those mentioned herein.

[0459] In some cases, nucleic acids introduced to plants and fungi may be codon optimized for expression in the plants and fungi. Methods of codon optimization include those described in Kwon K C, et al., Codon Optimization to Enhance Expression Yields Insights into Chloroplast Translation, Plant Physiol. 2016 September; 172(1):62-77.

[0460] The components (e.g., Cas proteins) in the compositions and systems may further comprise one or more functional domains described herein. In some examples, the functional domains may be an exonuclease. Such exonuclease may increase the efficiency of the Cas proteins' function, e.g., mutagenesis efficiency. An example of the functional domain is Trex2, as described in Weiss T et al., www.biorxiv.org/content/10.1101/2020.04.11.037572v1, doi: https://doi.org/10.1101/2020.04.11.037572.

### Examples of Plants

[0461] The compositions, systems, and methods herein can be used to confer desired traits on essentially any plant. A wide variety of plants and plant cell systems may be engineered for the desired physiological and agronomic characteristics. In general, the term “plant” relates to any various photosynthetic, eukaryotic, unicellular or multicellular organism of the kingdom Plantae characteristically growing by cell division, containing chloroplasts, and having cell walls comprised of cellulose. The term plant encompasses monocotyledonous and dicotyledonous plants.

[0462] The compositions, systems, and methods may be used over a broad range of plants, such as for example with dicotyledonous plants belonging to the orders Magniolales, Illiciales, Laurales, Piperales, Aristochiales, Nymphaeales, Ranunculales, Papeverales, Sarraceniaceae, Trochodendrales, Hamamelidales, Eucomiales, Leitneriales, Myricales, Fagales, Casuarinales, Caryophyllales, Batales, Polygonales, Plumbaginales, Dilleniales, Theales, Malvales, Urticales, Lecythidales, Violales, Salicales, Capparales, Ericales, Diapensales, Ebenales, Primulales, Rosales, Fabales, Podostemales, Haloragales, Myrtales, Cornales, Proteales, San tales, Rafflesiales, Celastrales, Euphorbiales, Rhamnales, Sapindales, Juglandales, Geraniales, Polygalales, Umbellales, Gentianales, Polemoniales, Lamiales, Plantaginales, Scrophulariales, Campanulales, Rubiales, Dipsacales, and Asterales; monocotyledonous plants such as those belonging to the orders Alismatales, Hydrocharitales, Najadales, Triuridales, Commelinales, Eriocaulales, Restionales, Poales, Juncales, Cyperales, Typhales, Bromeliales, Zingiberales, Arecales, Cyclanthales, Pandanales, Arales, Lilliales, and Orchid ales, or with plants belonging to Gymnospermae, e.g. those belonging to the orders Pinales, Ginkgoales, Cycadales, Araucariales, Cupressales and Gnetales.

[0463] The compositions, systems, and methods herein can be used over a broad range of plant species, included in the non-limitative list of dicot, monocot or gymnosperm genera hereunder: Atropa, Alseodaphne, Anacardium, Arachis, Beilschmiedia, Brassica, Carthamus, Cocculus, Croton, Cucumis, Citrus, Citrullus, Capsicum, Catharanthus, Cocos, Coffea, Cucurbita, Daucus, Duguetia, Eschscholzia, Ficus, Fragaria, Glaucium, Glycine, Gossypium, Helianthus, Hevea, Hyoscyamus, Lactuca, Landolphia, Linum, Litsea, Lycopersicon, Lupinus, Manihot, Majorana, Malus, Medicago, Nicotiana, Olea, Parthenium, Papaver, Persea, Phaseolus, Pistacia, Pisum, Pyrus, Prunus, Raphanus, Ricinus, Senecio, Sinomenium, Stephania, Sinapis, Solanum, Theobroma, Trifolium, Trigonella, Vicia, Vinca, Vilis, and Vigna; and the genera Allium, Andropogon, Aragrostis, Asparagus, Avena, Cynodon, Elaeis, Festuca, Festulolium, Heterocallis, Hordeum, Lemna, Lolium, Musa, Oryza, Panicum, Pannesetum, Phleum, Poa, Secale, Sorghum, Triticum, Zea, Abies, Cunninghamia, Ephedra, Picea, Pinus, and Pseudotsuga.

[0464] In some embodiments, target plants and plant cells for engineering include those monocotyledonous and dicotyledonous plants, such as crops including grain crops (e.g., wheat, maize, rice, millet, barley), fruit crops (e.g., tomato, apple, pear, strawberry, orange), forage crops (e.g., alfalfa), root vegetable crops (e.g., carrot, potato, sugar beets, yam), leafy vegetable crops (e.g., lettuce, spinach); flowering plants (e.g., petunia, rose, chrysanthemum), conifers and pine trees (e.g., pine fir, spruce); plants used in phytoremediation (e.g., heavy metal accumulating plants); oil crops (e.g., sunflower, rape seed) and plants used for experimental purposes (e.g., Arabidopsis). Specifically, the plants are intended to comprise without limitation angiosperm and gymnosperm plants such as acacia, alfalfa, amaranth, apple, apricot, artichoke, ash tree, asparagus, avocado, banana, barley, beans, beet, birch, beech, blackberry, blueberry, broccoli, Brussel's sprouts, cabbage, canola, cantaloupe, carrot, cassava, cauliflower, cedar, a cereal, celery, chestnut, cherry, Chinese cabbage, citrus, clementine, clover, coffee, corn, cotton, cowpea, cucumber, cypress, eggplant, elm, endive, eucalyptus, fennel, figs, fir, geranium, grape, grapefruit, groundnuts, ground cherry, gum hemlock, hickory, kale, kiwifruit, kohlrabi, larch, lettuce, leek, lemon, lime, locust, pine, maidenhair, maize, mango, maple, melon, millet, mushroom, mustard, nuts, oak, oats, oil palm, okra, onion, orange, an ornamental plant or flower or tree, papaya, palm, parsley, parsnip, pea, peach, peanut, pear, peat, pepper, persimmon, pigeon pea, pine, pineapple, plantain, plum, pomegranate, potato, pumpkin, radicchio, radish, rapeseed, raspberry, rice, rye, sorghum, safflower, sallow, soybean, spinach, spruce, squash, strawberry, sugar beet, sugarcane, sunflower, sweet potato, sweet corn, tangerine, tea, tobacco, tomato, trees, triticale, turf grasses, turnips, vine, walnut, watercress, watermelon, wheat, yams, yew, and zucchini.

[0465] The term plant also encompasses Algae, which are mainly photoautotrophs unified primarily by their lack of roots, leaves and other organs that characterize higher plants. The compositions, systems, and methods can be used over a broad range of “algae” or “algae cells.” Examples of algae include eukaryotic phyla, including the Rhodophyta (red algae), Chlorophyta (green algae), Phaeophyta (brown algae), Bacillariophyta (diatoms), Eustigmatophyta and dinoflagellates as well as the prokaryotic phylum Cyanobacteria (blue-green algae). Examples of algae species include those of Amphora, Anabaena, Anikstrodesmis, Botryococcus, Chaetoceros, Chlamydomonas, Chlorella, Chlorococcum, Cyclotella, Cylindrotheca, Dunaliella, Emiliana, Euglena, Hematococcus, Isochrysis, Monochrysis, Monoraphidium, Nannochloris, Nannnochloropsis, Navicula, Nephrochloris, Nephroselmis, Nitzschia, Nodularia, Nostoc, Oochromonas, Oocystis, Oscillartoria, Pavlova, Phaeodactylum, Playtmonas, Pleurochrysis, Porhyra, Pseudoanabaena, Pyramimonas, Stichococcus, Synechococcus, Synechocystis, Tetraselmis, Thalassiosira, and Trichodesmium.

### Plant Promoters

[0466] In order to ensure appropriate expression in a plant cell, the components of the components and systems herein may be placed under control of a plant promoter. A plant promoter is a promoter operable in plant cells. A plant promoter is capable of initiating transcription in plant cells, whether or not its origin is a plant cell. The use of different types of promoters is envisaged.

[0467] In some examples, the plant promoter is a constitutive plant promoter, which is a promoter that is able to express the open reading frame (ORF) that it controls in all or nearly all of the plant tissues during all or nearly all developmental stages of the plant (referred to as “constitutive expression”). One example of a constitutive promoter is the cauliflower mosaic virus 35S promoter. In some examples, the plant promoter is a regulated promoter, which directs gene expression not constitutively, but in a temporally- and/or spatially-regulated manner, and includes tissue-specific, tissue-preferred and inducible promoters. Different promoters may direct the expression of a gene in different tissues or cell types, or at different stages of development, or in response to different environmental conditions. In some examples, the plant promoter is a tissue-preferred promoters, which can be utilized to target enhanced expression in certain cell types within a particular plant tissue, for instance vascular cells in leaves or roots or in specific cells of the seed.

[0468] Exemplary plant promoters include those obtained from plants, plant viruses, and bacteria such as Agrobacterium or Rhizobium which comprise genes expressed in plant cells. Additional examples of promoters include those described in Kawamata et al., (1997) Plant Cell Physiol 38:792-803; Yamamoto et al., (1997) Plant J 12:255-65; Hire et al, (1992) Plant Mol Biol 20:207-18, Kuster et al, (1995) Plant Mol Biol 29:759-72, and Capana et al., (1994) Plant Mol Biol 25:681-91.

[0469] In some examples, a plant promoter may be an inducible promoter, which is inducible and allows for spatiotemporal control of gene editing or gene expression may use a form of energy. The form of energy may include sound energy, electromagnetic radiation, chemical energy and/or thermal energy. Examples of inducible systems include tetracycline inducible promoters (Tet-On or Tet-Off), small molecule two-hybrid transcription activations systems (FKBP, ABA, etc), or light inducible systems (Phytochrome, LOV domains, or cryptochrome), such as a Light Inducible Transcriptional Effector (LITE) that direct changes in transcriptional activity in a sequence-specific manner. In a particular example, of the components of a light inducible system include a Cas protein, a light-responsive cytochrome heterodimer (e.g. from Arabidopsis thaliana), and a transcriptional activation/repression domain.

[0470] In some examples, the promoter may be a chemical-regulated promotor (where the application of an exogenous chemical induces gene expression) or a chemical-repressible promoter (where application of the chemical represses gene expression). Examples of chemical-inducible promoters include maize ln2-2 promoter (activated by benzene sulfonamide herbicide safeners), the maize GST promoter (activated by hydrophobic electrophilic compounds used as pre-emergent herbicides), the tobacco PR-1 a promoter (activated by salicylic acid), promoters regulated by antibiotics (such as tetracycline-inducible and tetracycline-repressible promoters).

### Stable Integration in the Genome of Plants

[0471] In some embodiments, polynucleotides encoding the components of the compositions and systems may be introduced for stable integration into the genome of a plant cell. In some cases, vectors or expression systems may be used for such integration. The design of the vector or the expression system can be adjusted depending on for when, where and under what conditions the guide RNA and/or the Cas gene are expressed. In some cases, the polynucleotides may be integrated into an organelle of a plant, such as a plastid, mitochondrion or a chloroplast. The elements of the expression system may be on one or more expression constructs which are either circular such as a plasmid or transformation vector, or non-circular such as linear double stranded DNA.

[0472] In some embodiments, the method of integration generally comprises the steps of selecting a suitable host cell or host tissue, introducing the construct(s) into the host cell or host tissue, and regenerating plant cells or plants therefrom. In some examples, the expression system for stable integration into the genome of a plant cell may contain one or more of the following elements: a promoter element that can be used to express the RNA and/or Cas enzyme in a plant cell; a 5′ untranslated region to enhance expression; an intron element to further enhance expression in certain cells, such as monocot cells; a multiple-cloning site to provide convenient restriction sites for inserting the guide RNA and/or the Cas gene sequences and other desired elements; and a 3′ untranslated region to provide for efficient termination of the expressed transcript.

### Transient Expression in Plants

[0473] In some embodiments, the components of the compositions and systems may be transiently expressed in the plant cell. In some examples, the compositions and systems may modify a target nucleic acid only when both the guide RNA and the Cas protein are present in a cell, such that genomic modification can further be controlled. As the expression of the Cas protein is transient, plants regenerated from such plant cells typically contain no foreign DNA. In certain examples, the Cas protein is stably expressed and the guide sequence is transiently expressed.

[0474] DNA and/or RNA (e.g., mRNA) may be introduced to plant cells for transient expression. In such cases, the introduced nucleic acid may be provided in sufficient quantity to modify the cell but do not persist after a contemplated period of time has passed or after one or more cell divisions.

[0475] The transient expression may be achieved using suitable vectors. Exemplary vectors that may be used for transient expression include a pEAQ vector (may be tailored for Agrobacterium-mediated transient expression) and Cabbage Leaf Curl virus (CaLCuV), and vectors described in Sainsbury F. et al., Plant Biotechnol J. 2009 September; 7(7):682-93; and Yin K et al., Scientific Reports volume 5, Article number: 14926 (2015).

[0476] Combinations of the different methods described above are also envisaged.

Translocation to and/or Expression in Specific Plant Organelles

[0477] The compositions and systems herein may comprise elements for translocation to and/or expression in a specific plant organelle.

### Chloroplast Targeting

[0478] In some embodiments, it is envisaged that the compositions and systems are used to specifically modify chloroplast genes or to ensure expression in the chloroplast. The compositions and systems (e.g., Cas proteins, guide molecules, or their encoding polynucleotides) may be transformed, compartmentalized, and/or targeted to the chloroplast. In an example, the introduction of genetic modifications in the plastid genome can reduce biosafety issues such as gene flow through pollen.

[0479] Examples of methods of chloroplast transformation include Particle bombardment, PEG treatment, and microinjection, and the translocation of transformation cassettes from the nuclear genome to the plastid. In some examples, targeting of chloroplasts may be achieved by incorporating in chloroplast localization sequence, and/or the expression construct a sequence encoding a chloroplast transit peptide (CTP) or plastid transit peptide, operably linked to the 5′ region of the sequence encoding the components of the compositions and systems. Additional examples of transforming, targeting and localization of chloroplasts include those described in WO2010061186, Protein Transport into Chloroplasts, 2010, Annual Review of Plant Biology, Vol. 61: 157-180, and US 20040142476, which are incorporated by reference herein in their entireties.

### Exemplary Applications in Plants

[0480] The compositions, systems, and methods may be used to generate genetic variation(s) in a plant (e.g., crop) of interest. One or more, e.g., a library of, guide molecules targeting one or more locations in a genome may be provided and introduced into plant cells together with the Cas effector protein. For example, a collection of genome-scale point mutations and gene knock-outs can be generated. In some examples, the compositions, systems, and methods may be used to generate a plant part or plant from the cells so obtained and screening the cells for a trait of interest. The target genes may include both coding and non-coding regions. In some cases, the trait is stress tolerance and the method is a method for the generation of stress-tolerant crop varieties.

[0481] In some embodiments, the compositions, systems, and methods are used to modify endogenous genes or to modify their expression. The expression of the components may induce targeted modification of the genome, either by direct activity of the Cas nuclease and optionally introduction of template DNA, or by modification of genes targeted. The different strategies described herein above allow Cas-mediated targeted genome editing without requiring the introduction of the components into the plant genome.

[0482] In some cases, the modification may be performed without the permanent introduction into the genome of the plant of any foreign gene, including those encoding CRISPR components, so as to avoid the presence of foreign DNA in the genome of the plant. This can be of interest as the regulatory requirements for non-transgenic plants are less rigorous. Components which are transiently introduced into the plant cell are typically removed upon crossing.

[0483] For example, the modification may be performed by transient expression of the components of the compositions and systems. The transient expression may be performed by delivering the components of the compositions and systems with viral vectors, delivery into protoplasts, with the aid of particulate molecules such as nanoparticles or CPPs.

Generation of Plants with Desired Traits

[0484] The compositions, systems, and methods herein may be used to introduce desired traits to plants. The approaches include introduction of one or more foreign genes to confer a trait of interest, editing or modulating endogenous genes to confer a trait of interest.

### Agronomic Traits

[0485] In some embodiments, crop plants can be improved by influencing specific plant traits. Examples of the traits include improved agronomic traits such as herbicide resistance, disease resistance, abiotic stress tolerance, high yield, and superior quality, pesticide-resistance, disease resistance, insect and nematode resistance, resistance against parasitic weeds, drought tolerance, nutritional value, stress tolerance, self-pollination voidance, forage digestibility biomass, and grain yield.

[0486] In some embodiments, genes that confer resistance to pests or diseases may be introduced to plants. In cases there are endogenous genes that confer such resistance in plants, their expression and function may be enhanced (e.g., by introducing extra copies, modifications that enhance expression and/or activity).

[0487] Examples of genes that confer resistance include plant disease resistance genes (e.g., Cf-9, Pto, RSP2, SIDMR6-1), genes conferring resistance to a pest (e.g., those described in WO96/30517), Bacillus thuringiensis proteins, lectins, Vitamin-binding proteins (e.g., avidin), enzyme inhibitors (e.g., protease or proteinase inhibitors or amylase inhibitors), insect-specific hormones or pheromones (e.g., ecdysteroid or a juvenile hormone, variant thereof, a mimetic based thereon, or an antagonist or agonist thereof) or genes involved in the production and regulation of such hormone and pheromones, insect-specific peptides or neuropeptide, Insect-specific venom (e.g., produced by a snake, a wasp, etc., or analog thereof), Enzymes responsible for a hyperaccumulation of a monoterpene, a sesquiterpene, a steroid, hydroxamic acid, a phenylpropanoid derivative or another nonprotein molecule with insecticidal activity, Enzymes involved in the modification of biologically active molecule (e.g., a glycolytic enzyme, a proteolytic enzyme, a lipolytic enzyme, a nuclease, a cyclase, a transaminase, an esterase, a hydrolase, a phosphatase, a kinase, a phosphorylase, a polymerase, an elastase, a chitinase and a glucanase, whether natural or synthetic), molecules that stimulates signal transduction, Viral-invasive proteins or a complex toxin derived therefrom, Developmental-arrestive proteins produced in nature by a pathogen or a parasite, a developmental-arrestive protein produced in nature by a plant, or any combination thereof.

[0488] The compositions, systems, and methods may be used to identify, screen, introduce or remove mutations or sequences lead to genetic variability that give rise to susceptibility to certain pathogens, e.g., host specific pathogens. Such approach may generate plants that are non-host resistance, e.g., the host and pathogen are incompatible or there can be partial resistance against all races of a pathogen, typically controlled by many genes and/or also complete resistance to some races of a pathogen but not to other races.

[0489] In some embodiments, compositions, systems, and methods may be used to modify genes involved in plant diseases. Such genes may be removed, inactivated, or otherwise regulated or modified. Examples of plant diseases include those described in [0045]-[0080] of US20140213619A1, which is incorporated by reference herein in its entirety.

[0490] In some embodiments, genes that confer resistance to herbicides may be introduced to plants. Examples of genes that confer resistance to herbicides include genes conferring resistance to herbicides that inhibit the growing point or meristem, such as an imidazolinone or a sulfonylurea, genes conferring glyphosate tolerance (e.g., resistance conferred by, e.g., mutant 5-enolpyruvylshikimate-3-phosphate synthase genes, aroA genes and glyphosate acetyl transferase (GAT) genes, respectively), or resistance to other phosphono compounds such as by glufosinate (phosphinothricin acetyl transferase (PAT) genes from Streptomyces species, including Streptomyces hygroscopicus and Streptomyces viridichromogenes), and to pyridinoxy or phenoxy proprionic acids and cyclohexones by ACCase inhibitor-encoding genes), genes conferring resistance to herbicides that inhibit photosynthesis (such as a triazine (psbA and gs+ genes) or a benzonitrile (nitrilase gene), and glutathione S-transferase), genes encoding enzymes detoxifying the herbicide or a mutant glutamine synthase enzyme that is resistant to inhibition, genes encoding a detoxifying enzyme is an enzyme encoding a phosphinothricin acetyltransferase (such as the bar or pat protein from Streptomyces species), genes encoding hydroxyphenylpyruvatedioxygenases (HPPD) inhibitors, e.g., naturally occurring HPPD resistant enzymes, and genes encoding a mutated or chimeric HPPD enzyme.

[0491] In some embodiments, genes involved in Abiotic stress tolerance may be introduced to plants. Examples of genes include those capable of reducing the expression and/or the activity of poly(ADP-ribose) polymerase (PARP) gene, transgenes capable of reducing the expression and/or the activity of the PARG encoding genes, genes coding for a plant-functional enzyme of the nicotineamide adenine dinucleotide salvage synthesis pathway including nicotinamidase, nicotinate phosphoribosyltransferase, nicotinic acid mononucleotide adenyl transferase, nicotinamide adenine dinucleotide synthetase or nicotine amide phosphorybosyltransferase, enzymes involved in carbohydrate biosynthesis, enzymes involved in the production of polyfructose (e.g., the inulin and levan-type), the production of alpha-1,6 branched alpha-1,4-glucans, the production of alternan, the production of hyaluronan.

[0492] In some embodiments, genes that improve drought resistance may be introduced to plants. Examples of genes Ubiquitin Protein Ligase protein (UPL) protein (UPL3), DR02, DR03, ABC transporter, and DREB1A.

### Nutritionally Improved Plants

[0493] In some embodiments, the compositions, systems, and methods may be used to produce nutritionally improved plants. In some examples, such plants may provide functional foods, e.g., a modified food or food ingredient that may provide a health benefit beyond the traditional nutrients it contains. In certain examples, such plants may provide nutraceuticals foods, e.g., substances that may be considered a food or part of a food and provides health benefits, including the prevention and treatment of disease. The nutraceutical foods may be useful in the prevention and/or treatment of diseases in animals and humans, e.g., cancers, diabetes, cardiovascular disease, and hypertension.

[0494] An improved plant may naturally produce one or more desired compounds and the modification may enhance the level or activity or quality of the compounds. In some cases, the improved plant may not naturally produce the compound(s), while the modification enables the plant to produce such compound(s). In some cases, the compositions, systems, and methods used to modify the endogenous synthesis of these compounds indirectly, e.g. by modifying one or more transcription factors that controls the metabolism of this compound.

[0495] Examples of nutritionally improved plants include plants comprising modified protein quality, content and/or amino acid composition, essential amino acid contents, oils and fatty acids, carbohydrates, vitamins and carotenoids, functional secondary metabolites, and minerals. In some examples, the improved plants may comprise or produce compounds with health benefits. Examples of nutritionally improved plants include those described in Newell-McGloughlin, Plant Physiology, July 2008, Vol. 147, pp. 939-953.

[0496] Examples of compounds that can be produced include carotenoids (e.g., α-Carotene or β-Carotene), lutein, lycopene, Zeaxanthin, Dietary fiber (e.g., insoluble fibers, β-Glucan, soluble fibers, fatty acids (e.g., ω-3 fatty acids, Conjugated linoleic acid, GLA,), Flavonoids (e.g., Hydroxycinnamates, flavonols, catechins and tannins), Glucosinolates, indoles, isothiocyanates (e.g., Sulforaphane), Phenolics (e.g., stilbenes, caffeic acid and ferulic acid, epicatechin), Plant stanols/sterols, Fructans, inulins, fructo-oligosaccharides, Saponins, Soybean proteins, Phytoestrogens (e.g., isoflavones, lignans), Sulfides and thiols such as diallyl sulphide, Allyl methyl trisulfide, dithiolthiones, Tannins, such as proanthocyanidins, or any combination thereof.

[0497] The compositions, systems, and methods may also be used to modify protein/starch functionality, shelf life, taste/aesthetics, fiber quality, and allergen, antinutrient, and toxin reduction traits.

[0498] Examples of genes and nucleic acids that can be modified to introduce the traits include stearyl-ACP desaturase, DNA associated with the single allele which may be responsible for maize mutants characterized by low levels of phytic acid, Tf RAP2.2 and its interacting partner SINAT2, Tf Dofl, and DOF Tf AtDofl.1 (OBP2).

### Modification of Polyploid Plants

[0499] The compositions, systems, and methods may be used to modify polyploid plants. Polyploid plants carry duplicate copies of their genomes (e.g. as many as six, such as in wheat). In some cases, the compositions, systems, and methods may be can be multiplexed to affect all copies of a gene, or to target dozens of genes at once. For instance, the compositions, systems, and methods may be used to simultaneously ensure a loss of function mutation in different genes responsible for suppressing defenses against a disease. The modification may be simultaneous suppression the expression of the TaMLO-A1, TaMLO-B1 and TaMLO-D1 nucleic acid sequence in a wheat plant cell and regenerating a wheat plant therefrom, in order to ensure that the wheat plant is resistant to powdery mildew (e.g., as described in WO2015109752).

### Regulation of Fruit-Ripening

[0500] The compositions, systems, and methods may be used to regulate ripening of fruits. Ripening is a normal phase in the maturation process of fruits and vegetables. Only a few days after it starts it may render a fruit or vegetable inedible, which can bring significant losses to both farmers and consumers.

[0501] In some embodiments, the compositions, systems, and methods are used to reduce ethylene production. In some examples, the compositions, systems, and methods may be used to suppress the expression and/or activity of ACC synthase, insert a ACC deaminase gene or a functional fragment thereof, insert a SAM hydrolase gene or functional fragment thereof, suppress ACC oxidase gene expression.

[0502] Alternatively or additionally, the compositions, systems, and methods may be used to modify ethylene receptors (e.g., suppressing ETR1) and/or Polygalacturonase (PG). Suppression of a gene may be achieved by introducing a mutation, an antisense sequence, and/or a truncated copy of the gene to the genome.

### Increasing Storage Life of Plants

[0503] In some embodiments, the compositions, systems, and methods are used to modify genes involved in the production of compounds which affect storage life of the plant or plant part. The modification may be in a gene that prevents the accumulation of reducing sugars in potato tubers. Upon high-temperature processing, these reducing sugars react with free amino acids, resulting in brown, bitter-tasting products and elevated levels of acrylamide, which is a potential carcinogen. In particular embodiments, the methods provided herein are used to reduce or inhibit expression of the vacuolar invertase gene (VInv), which encodes a protein that breaks down sucrose to glucose and fructose.

### Reducing Allergens in Plants

[0504] In some embodiments, the compositions, systems, and methods are used to generate plants with a reduced level of allergens, making them safer for consumers. To this end, the compositions, systems, and methods may be used to identify and modify (e.g., suppress) one or more genes responsible for the production of plant allergens. Examples of such genes include Lol p5, as well as those in peanuts, soybeans, lentils, peas, lupin, green beans, mung beans, such as those described in Nicolaou et al., Current Opinion in Allergy and Clinical Immunology 2011; 11(3):222), which is incorporated by reference herein in its entirety.

### Generation of Male Sterile Plants

[0505] The compositions, systems, and methods may be used to generate male sterile plants. Hybrid plants typically have advantageous agronomic traits compared to inbred plants. However, for self-pollinating plants, the generation of hybrids can be challenging. In different plant types (e.g., maize and rice), genes have been identified which are important for plant fertility, more particularly male fertility. Plants that are as such genetically altered can be used in hybrid breeding programs.

[0506] The compositions, systems, and methods may be used to modify genes involved male fertility, e.g., inactivating (such as by introducing mutations to) genes required for male fertility. Examples of the genes involved in male fertility include cytochrome P450-like gene (MS26) or the meganuclease gene (MS45), and those described in Wan X et al., Mol Plant. 2019 Mar. 4; 12(3):321-342; and Kim Y J, et al., Trends Plant Sci. 2018 January; 23(1):53-65.

### Increasing the Fertility Stage in Plants

[0507] In some embodiments, the compositions, systems, and methods may be used to prolong the fertility stage of a plant such as of a rice. For instance, a rice fertility stage gene such as Ehd3 can be targeted in order to generate a mutation in the gene and plantlets can be selected for a prolonged regeneration plant fertility stage.

### Production of Early Yield of Products

[0508] In some embodiments, the compositions, systems, and methods may be used to produce early yield of the product. For example, flowering process may be modulated, e.g., by mutating flowering repressor gene such as SP5G. Examples of such approaches include those described in Soyk S, et al., Nat Genet. 2017 January; 49(1):162-168.

### Oil and Biofuel Production

[0509] The compositions, systems, and methods may be used to generate plants for oil and biofuel production. Biofuels include fuels made from plant and plant-derived resources. Biofuels may be extracted from organic matter whose energy has been obtained through a process of carbon fixation or are made through the use or conversion of biomass. This biomass can be used directly for biofuels or can be converted to convenient energy containing substances by thermal conversion, chemical conversion, and biochemical conversion. This biomass conversion can result in fuel in solid, liquid, or gas form. Biofuels include bioethanol and biodiesel. Bioethanol can be produced by the sugar fermentation process of cellulose (starch), which may be derived from maize and sugar cane. Biodiesel can be produced from oil crops such as rapeseed, palm, and soybean. Biofuels can be used for transportation.

### Generation of Plants for Production of Vegetable Oils and Biofuels

[0510] The compositions, systems, and methods may be used to generate algae (e.g., diatom) and other plants (e.g., grapes) that express or overexpress high levels of oil or biofuels.

[0511] In some cases, the compositions, systems, and methods may be used to modify genes involved in the modification of the quantity of lipids and/or the quality of the lipids. Examples of such genes include those involved in the pathways of fatty acid synthesis, e.g., acetyl-CoA carboxylase, fatty acid synthase, 3-ketoacyl_acyl-carrier protein synthase III, glycerol-3-phospate dehydrogenase (G3PDH), Enoyl-acyl carrier protein reductase (Enoyl-ACP-reductase), glycerol-3-phosphate acyltransferase, lysophosphatidic acyl transferase or diacylglycerol acyltransferase, phospholipid:diacylglycerol acyltransferase, phoshatidate phosphatase, fatty acid thioesterase such as palmitoyl protein thioesterase, or malic enzyme activities.

[0512] In further embodiments it is envisaged to generate diatoms that have increased lipid accumulation. This can be achieved by targeting genes that decrease lipid catabolization. Examples of genes include those involved in the activation of triacylglycerol and free fatty acids, β-oxidation of fatty acids, such as genes of acyl-CoA synthetase, 3-ketoacyl-CoA thiolase, acyl-CoA oxidase activity and phosphoglucomutase.

[0513] In some examples, algae may be modified for production of oil and biofuels, including fatty acids (e.g., fatty esters such as acid methyl esters (FAME) and fatty acid ethyl esters (FAEE)). Examples of methods of modifying microalgae include those described in Stovicek et al. Metab. Eng. Comm., 2015; 2:1; U.S. Pat. No. 8,945,839; and WO 2015086795.

[0514] In some examples, one or more genes may be introduced (e.g., overexpressed) to the plants (e.g., algae) to produce oils and biofuels (e.g., fatty acids) from a carbon source (e.g., alcohol). Examples of the genes include genes encoding acyl-CoA synthases, ester synthases, thioesterases (e.g., tesA, ‘tesA, tesB, fatB, fatB2, fatB3, fatAl, or fatA), acyl-CoA synthases (e.g., fadD, JadK, BH3103, pfl-4354, EAV15023, fadDl, fadD2, RPC_4074,fadDD35, fadDD22, faa39), ester synthases (e.g., synthase/acyl-CoA:diacylglycerl acyltransferase from Simmondsia chinensis, Acinetobacter sp. ADP, Alcanivorax borkumensis, Pseudomonas aeruginosa, Fundibacter jadensis, Arabidopsis thaliana, or Alkaligenes eutrophus, or variants thereof).

[0515] Additionally, or alternatively, one or more genes in the plants (e.g., algae) may be inactivated (e.g., expression of the genes is decreased). For examples, one or more mutations may be introduced to the genes. Examples of such genes include genes encoding acyl-CoA dehydrogenases (e.g., fade), outer membrane protein receptors, and transcriptional regulator (e.g., repressor) of fatty acid biosynthesis (e.g., fabR), pyruvate formate lyases (e.g., pflB), lactate dehydrogenases (e.g., IdhA).

### Organic Acid Production

[0516] In some embodiments, plants may be modified to produce organic acids such as lactic acid. The plants may produce organic acids using sugars, pentose or hexose sugars. To this end, one or more genes may be introduced (e.g., and overexpressed) in the plants. An example of such genes include LDH gene.

[0517] In some examples, one or more genes may be inactivated (e.g., expression of the genes is decreased). For examples, one or more mutations may be introduced to the genes. The genes may include those encoding proteins involved an endogenous metabolic pathway which produces a metabolite other than the organic acid of interest and/or wherein the endogenous metabolic pathway consumes the organic acid.

[0518] Examples of genes that can be modified or introduced include those encoding pyruvate decarboxylases (pdc), fumarate reductases, alcohol dehydrogenases (adh), acetaldehyde dehydrogenases, phosphoenolpyruvate carboxylases (ppc), D-lactate dehydrogenases (d-ldh), L-lactate dehydrogenases (1-ldh), lactate 2-monooxygenases, lactate dehydrogenase, cytochrome-dependent lactate dehydrogenases (e.g., cytochrome B2-dependent L-lactate dehydrogenases).

### Enhancing Plant Properties for Biofuel Production

[0519] In some embodiments, the compositions, systems, and methods are used to alter the properties of the cell wall of plants to facilitate access by key hydrolyzing agents for a more efficient release of sugars for fermentation. By reducing the proportion of lignin in a plant the proportion of cellulose can be increased. In particular embodiments, lignin biosynthesis may be downregulated in the plant so as to increase fermentable carbohydrates.

[0520] In some examples, one or more lignin biosynthesis genes may be down regulated. Examples of such genes include 4-coumarate 3-hydroxylases (C3H), phenylalanine ammonia-lyases (PAL), cinnamate 4-hydroxylases (C4H), hydroxycinnamoyl transferases (HCT), caffeic acid O-methyltransferases (COMT), caffeoyl CoA 3-O-methyltransferases (CCoAOMT), ferulate 5-hydroxylases (F5H), cinnamyl alcohol dehydrogenases (CAD), cinnamoyl CoA-reductases (CCR), 4-coumarate-CoA ligases (4CL), monolignol-lignin-specific glycosyltransferases, and aldehyde dehydrogenases (ALDH), and those described in WO 2008064289.

[0521] In some examples, plant mass that produces lower level of acetic acid during fermentation may be reduced. To this end, genes involved in polysaccharide acetylation (e.g., Cas1L and those described in WO 2010096488) may be inactivated.

### Other Microorganisms for Oils and Biofuel Production

[0522] In some embodiments, microorganisms other than plants may be used for production of oils and biofuels using the compositions, systems, and methods herein. Examples of the microorganisms include those of the genus of Escherichia, Bacillus, Lactobacillus, Rhodococcus, Synechococcus, Synechoystis, Pseudomonas, Aspergillus, Trichoderma, Neurospora, Fusarium, Humicola, Rhizomucor, Kluyveromyces, Pichia, Mucor, Myceliophtora, Penicillium, Phanerochaete, Pleurotus, Trametes, Chrysosporium, Saccharomyces, Stenotrophamonas, Schizosaccharomyces, Yarrowia, or Streptomyces.

### Plant Cultures and Regeneration

[0523] In some embodiments, the modified plants or plant cells may be cultured to regenerate a whole plant which possesses the transformed or modified genotype and thus the desired phenotype. Examples of regeneration techniques include those relying on manipulation of certain phytohormones in a tissue culture growth medium, relying on a biocide and/or herbicide marker which has been introduced together with the desired nucleotide sequences, obtaining from cultured protoplasts, plant callus, explants, organs, pollens, embryos or parts thereof.

### Detecting Modifications in the Plant Genome-Selectable Markers

[0524] When the compositions, systems, and methods are used to modify a plant, suitable methods may be used to confirm and detect the modification made in the plant. In some examples, when a variety of modifications are made, one or more desired modifications or traits resulting from the modifications may be selected and detected. The detection and confirmation may be performed by biochemical and molecular biology techniques such as Southern analysis, PCR, Northern blot, S1 RNase protection, primer-extension or reverse transcriptase-PCR, enzymatic assays, ribozyme activity, gel electrophoresis, Western blot, immunoprecipitation, enzyme-linked immunoassays, in situ hybridization, enzyme staining, and immunostaining.

[0525] In some cases, one or more markers, such as selectable and detectable markers, may be introduced to the plants. Such markers may be used for selecting, monitoring, isolating cells and plants with desired modifications and traits. A selectable marker can confer positive or negative selection and is conditional or non-conditional on the presence of external substrates. Examples of such markers include genes and proteins that confer resistance to antibiotics, such as hygromycin (hpt) and kanamycin (nptII), and genes that confer resistance to herbicides, such as phosphinothricin (bar) and chlorosulfuron (als), enzyme capable of producing or processing a colored substances (e.g., the β-glucuronidase, luciferase, B or C1 genes).

### Applications in Fungi

[0526] The compositions, systems, and methods described herein can be used to perform efficient and cost effective gene or genome interrogation or editing or manipulation in fungi or fungal cells, such as yeast. The approaches and applications in plants may be applied to fungi as well.

[0527] A fungal cell may be any type of eukaryotic cell within the kingdom of fungi, such as phyla of Ascomycota, Basidiomycota, Blastocladiomycota, Chytridiomycota, Glomeromycota, Microsporidia, and Neocallimastigomycota. Examples of fungi or fungal cells in include yeasts, molds, and filamentous fungi.

[0528] In some embodiments, the fungal cell is a yeast cell. A yeast cell refers to any fungal cell within the phyla Ascomycota and Basidiomycota. Examples of yeasts include budding yeast, fission yeast, and mold, S. cerervisiae, Kluyveromyces marxianus, Issatchenkia orientalis, Candida spp. (e.g., Candida albicans), Yarrowia spp. (e.g., Yarrowia lipolytica), Pichia spp. (e.g., Pichia pastoris), Kluyveromyces spp. (e.g., Kluyveromyces lactis and Kluyveromyces marxianus), Neurospora spp. (e.g., Neurospora crassa), Fusarium spp. (e.g., Fusarium oxysporum), and Issatchenkia spp. (e.g., Issatchenkia orientalis, Pichia kudriavzevii and Candida acidothermophilum).

[0529] In some embodiments, the fungal cell is a filamentous fungal cell, which grow in filaments, e.g., hyphae or mycelia. Examples of filamentous fungal cells include Aspergillus spp. (e.g., Aspergillus niger), Trichoderma spp. (e.g., Trichoderma reesei), Rhizopus spp. (e.g., Rhizopus oryzae), and Mortierella spp. (e.g., Mortierella isabellina).

[0530] In some embodiments, the fungal cell is of an industrial strain. Industrial strains include any strain of fungal cell used in or isolated from an industrial process, e.g., production of a product on a commercial or industrial scale. Industrial strain may refer to a fungal species that is typically used in an industrial process, or it may refer to an isolate of a fungal species that may be also used for non-industrial purposes (e.g., laboratory research). Examples of industrial processes include fermentation (e.g., in production of food or beverage products), distillation, biofuel production, production of a compound, and production of a polypeptide. Examples of industrial strains include, without limitation, JAY270 and ATCC4124.

[0531] In some embodiments, the fungal cell is a polyploid cell whose genome is present in more than one copy. Polyploid cells include cells naturally found in a polyploid state, and cells that has been induced to exist in a polyploid state (e.g., through specific regulation, alteration, inactivation, activation, or modification of meiosis, cytokinesis, or DNA replication). A polyploid cell may be a cell whose entire genome is polyploid, or a cell that is polyploid in a particular genomic locus of interest. In some examples, the abundance of guide RNA may more often be a rate-limiting component in genome engineering of polyploid cells than in haploid cells, and thus the methods using the CRISPR system described herein may take advantage of using certain fungal cell types.

[0532] In some embodiments, the fungal cell is a diploid cell, whose genome is present in two copies. Diploid cells include cells naturally found in a diploid state, and cells that have been induced to exist in a diploid state (e.g., through specific regulation, alteration, inactivation, activation, or modification of meiosis, cytokinesis, or DNA replication). A diploid cell may refer to a cell whose entire genome is diploid, or it may refer to a cell that is diploid in a particular genomic locus of interest.

[0533] In some embodiments, the fungal cell is a haploid cell, whose genome is present in one copy. Haploid cells include cells naturally found in a haploid state, or cells that have been induced to exist in a haploid state (e.g., through specific regulation, alteration, inactivation, activation, or modification of meiosis, cytokinesis, or DNA replication). A haploid cell may refer to a cell whose entire genome is haploid, or it may refer to a cell that is haploid in a particular genomic locus of interest.

[0534] The compositions and systems, and nucleic acid encoding thereof, may be introduced to fungi cells using the delivery systems and methods herein. Examples of delivery systems include lithium acetate treatment, bombardment, electroporation, and those described in Kawai et al., 2010, Bioeng Bugs. 2010 November-December; 1(6): 395-403.

[0535] In some examples, a yeast expression vector (e.g., those with one or more regulatory elements) may be used. Examples of such vectors include a centromeric (CEN) sequence, an autonomous replication sequence (ARS), a promoter, such as an RNA Polymerase III promoter, operably linked to a sequence or gene of interest, a terminator such as an RNA polymerase III terminator, an origin of replication, and a marker gene (e.g., auxotrophic, antibiotic, or other selectable markers). Examples of expression vectors for use in yeast may include plasmids, yeast artificial chromosomes, 2 plasmids, yeast integrative plasmids, yeast replicative plasmids, shuttle vectors, and episomal plasmids.

### Biofuel and Materials Production by Fungi

[0536] In some embodiments, the compositions, systems, and methods may be used for generating modified fungi for biofuel and material productions. For instance, the modified fungi for production of biofuel or biopolymers from fermentable sugars and optionally to be able to degrade plant-derived lignocellulose derived from agricultural waste as a source of fermentable sugars. Foreign genes required for biofuel production and synthesis may be introduced in to fungi In some examples, the genes may encode enzymes involved in the conversion of pyruvate to ethanol or another product of interest, degrade cellulose (e.g., cellulase), endogenous metabolic pathways which compete with the biofuel production pathway.

[0537] In some examples, the compositions, systems, and methods may be used for generating and/or selecting yeast strains with improved xylose or cellobiose utilization, isoprenoid biosynthesis, and/or lactic acid production. One or more genes involved in the metabolism and synthesis of these compounds may be modified and/or introduced to yeast cells. Examples of the methods and genes include lactate dehydrogenase, PDC1 and PDC5, and those described in Ha, S. J., et al. (2011) Proc. Natl. Acad. Sci. USA 108(2):504-9 and Galazka, J. M., et al. (2010) Science 330(6000):84-6; Jakociunas T et al., Metab Eng. 2015 March; 28:213-222; Stovicek V, et al., FEMS Yeast Res. 2017 Aug. 1; 17(5).

### Improved Plants and Yeast Cells

[0538] The present disclosure further provides improved plants and fungi. The improved and fungi may comprise one or more genes introduced, and/or one or more genes modified by the compositions, systems, and methods herein. The improved plants and fungi may have increased food or feed production (e.g., higher protein, carbohydrate, nutrient or vitamin levels), oil and biofuel production (e.g., methanol, ethanol), tolerance to pests, herbicides, drought, low or high temperatures, excessive water, etc.

[0539] The plants or fungi may have one or more parts that are improved, e.g., leaves, stems, roots, tubers, seeds, endosperm, ovule, and pollen. The parts may be viable, nonviable, regeneratable, and/or non-regeneratable.

[0540] The improved plants and fungi may include gametes, seeds, embryos, either zygotic or somatic, progeny and/or hybrids of improved plants and fungi. The progeny may be a clone of the produced plant or fungi, or may result from sexual reproduction by crossing with other individuals of the same species to introgress further desirable traits into their offspring. The cell may be in vivo or ex vivo in the cases of multicellular organisms, particularly plants.

### Further Applications of the CRISPR-Cas System in Plants

[0541] Further applications of the compositions, systems, and methods on plants and fungi include visualization of genetic element dynamics (e.g., as described in Chen B, et al., Cell. 2013 Dec. 19; 155(7):1479-91), targeted gene disruption positive-selection in vitro and in vivo (as described in Malina A et al., Genes Dev. 2013 Dec. 1; 27(23):2602-14), epigenetic modification such as using fusion of Cas and histone-modifying enzymes (e.g., as described in Rusk N, Nat Methods. 2014 January; 11(1):28), identifying transcription regulators (e.g., as described in Waldrip Z J, Epigenetics. 2014 September; 9(9):1207-11), anti-virus treatment for both RNA and DNA viruses (e.g., as described in Price A A, et al., Proc Natl Acad Sci USA. 2015 May 12; 112(19):6164-9; Ramanan V et al., Sci Rep. 2015 Jun. 2; 5:10833), alteration of genome complexity such as chromosome numbers (e.g., as described in Karimi-Ashtiyani R et al., Proc Natl Acad Sci USA. 2015 Sep. 8; 112(36):11211-6; Anton T, et al., Nucleus. 2014 March-April; 5(2):163-72), self-cleavage of the CRISPR system for controlled inactivation/activation (e.g., as described Sugano S S et al., Plant Cell Physiol. 2014 March; 55(3):475-81), multiplexed gene editing (as described in Kabadi A M et al., Nucleic Acids Res. 2014 Oct. 29; 42(19):e147), development of kits for multiplex genome editing (as described in Xing H L et al., BMC Plant Biol. 2014 Nov. 29; 14:327), starch production (as described in Hebelstrup K H et al., Front Plant Sci. 2015 Apr. 23; 6:247), targeting multiple genes in a family or pathway (e.g., as described in Ma X et al., Mol Plant. 2015 August; 8(8):1274-84), regulation of non-coding genes and sequences (e.g., as described in Lowder L G, et al., Plant Physiol. 2015 October; 169(2):971-85), editing genes in trees (e.g., as described in Belhaj K et al., Plant Methods. 2013 Oct. 11; 9(1):39; Harrison M M, et al., Genes Dev. 2014 Sep. 1; 28(17):1859-72; Zhou X et al., New Phytol. 2015 October; 208(2):298-301), introduction of mutations for resistance to host-specific pathogens and pests.

[0542] Additional examples of modifications of plants and fungi that may be performed using the compositions, systems, and methods include those described in International Patent Publication Nos. WO2016/099887, WO2016/025131, WO2016/073433, WO2017/066175, WO2017/100158, WO 2017/105991, WO2017/106414, WO2016/100272, WO2016/100571, WO 2016/100568, WO 2016/100562, and WO 2017/019867.

### Applications in Non-Human Animals

[0543] The compositions, systems, and methods may be used to study and modify non-human animals, e.g., introducing desirable traits and disease resilience, treating diseases, facilitating breeding, etc. In some embodiments, the compositions, systems, and methods may be used to improve breeding and introducing desired traits, e.g., increasing the frequency of trait-associated alleles, introgression of alleles from other breeds/species without linkage drag, and creation of de novo favorable alleles. Genes and other genetic elements that can be targeted may be screened and identified. Examples of application and approaches include those described in Tait-Burkard C, et al., Livestock 2.0—genome editing for fitter, healthier, and more productive farmed animals. Genome Biol. 2018 Nov. 26; 19(1):204; Lillico S, Agricultural applications of genome editing in farmed animals. Transgenic Res. 2019 August; 28(Suppl 2):57-60; Houston R D, et al., Harnessing genomics to fast-track genetic improvement in aquaculture. Nat Rev Genet. 2020 Apr. 16. doi: 10.1038/s41576-020-0227-y, which are incorporated herein by reference in their entireties. Applications described in other sections such as therapeutic, diagnostic, etc. can also be used on the animals herein.

[0544] The compositions, systems, and methods may be used on animals such as fish, amphibians, reptiles, mammals, and birds. The animals may be farm and agriculture animals, or pets. Examples of farm and agriculture animals include horses, goats, sheep, swine, cattle, llamas, alpacas, and birds, e.g., chickens, turkeys, ducks, and geese. The animals may be a non-human primate, e.g., baboons, capuchin monkeys, chimpanzees, lemurs, macaques, marmosets, tamarins, spider monkeys, squirrel monkeys, and vervet monkeys. Examples of pets include dogs, cats horses, wolfs, rabbits, ferrets, gerbils, hamsters, chinchillas, fancy rats, guinea pigs, canaries, parakeets, and parrots.

[0545] In some embodiments, one or more genes may be introduced (e.g., overexpressed) in the animals to obtain or enhance one or more desired traits. Growth hormones, insulin-like growth factors (IGF-1) may be introduced to increase the growth of the animals, e.g., pigs or salmon (such as described in Pursel V G et al., J Reprod Fertil Suppl. 1990; 40:235-45; Waltz E, Nature. 2017; 548:148). Fat-1 gene (e.g., from C elegans) may be introduced for production of larger ratio of n-3 to n-6 fatty acids may be induced, e.g. in pigs (such as described in Li M, et al., Genetics. 2018; 8:1747-54). Phytase (e.g., from E coli) xylanase (e.g., from Aspergillus niger), beta-glucanase (e.g., from bacillus lichenformis) may be introduced to reduce the environmental impact through phosphorous and nitrogen release reduction, e.g. in pigs (such as described in Golovan S P, et al., Nat Biotechnol. 2001; 19:741-5; Zhang X et al., elife. 2018). shRNA decoy may be introduced to induce avian influenza resilience e.g. in chicken (such as described in Lyall et al., Science. 2011; 331:223-6). Lysozyme or lysostaphin may be introduced to induce mastitis resilience e.g., in goat and cow (such as described in Maga E A et al., Foodborne Pathog Dis. 2006; 3:384-92; Wall R J, et al., Nat Biotechnol. 2005; 23:445-51). Histone deacetylase such as HDAC6 may be introduced to induce PRRSV resilience, e.g., in pig (such as described in Lu T., et al., PLoS One. 2017; 12:e0169317). CD163 may be modified (e.g., inactivated or removed) to introduce PRRSV resilience in pigs (such as described in Prather R S et al., Sci Rep. 2017 Oct. 17; 7(1):13371). Similar approaches may be used to inhibit or remove viruses and bacteria (e.g., Swine Influenza Virus (SIV) strains which include influenza C and the subtypes of influenza A known as H1N1, H1N2, H2N1, H3N1, H3N2, and H2N3, as well as pneumonia, meningitis and oedema) that may be transmitted from animals to humans.

[0546] In some embodiments, one or more genes may be modified or edited for disease resistance and production traits. Myostatin (e.g., GDF8) may be modified to increase muscle growth, e.g., in cow, sheep, goat, catfish, and pig (such as described in Crispo M et al., PLoS One. 2015; 10:e0136690; Wang X, et al., Anim Genet. 2018; 49:43-51; Khalil K, et al., Sci Rep. 2017; 7:7301; Kang J-D, et al., RSC Adv. 2017; 7:12541-9). Pc POLLED may be modified to induce horlessness, e.g., in cow (such as described in Carlson D F et al., Nat Biotechnol. 2016; 34:479-81). KISSIR may be modified to induce boretaint (hormone release during sexual maturity leading to undesired meat taste), e.g., in pigs. Dead end protein (dnd) may be modified to induce sterility, e.g., in salmon (such as described in Wargelius A, et al., Sci Rep. 2016; 6:21284). Nano2 and DDX may be modified to induce sterility (e.g., in surrogate hosts), e.g., in pigs and chicken (such as described Park K-E, et al., Sci Rep. 2017; 7:40176; Taylor L et al., Development. 2017; 144:928-34). CD163 may be modified to induce PRRSV resistance, e.g., in pigs (such as described in Whitworth K M, et al., Nat Biotechnol. 2015; 34:20-2). RELA may be modified to induce ASFV resilience, e.g., in pigs (such as described in Lillico S G, et al., Sci Rep. 2016; 6:21645). CD18 may be modified to induce Mannheimia (Pasteurella) haemolytica resilience, e.g., in cows (such as described in Shanthalingam S, et al., roc Natl Acad Sci USA. 2016; 113:13186-90). NRAMP1 may be modified to induce tuberculosis resilience, e.g., in cows (such as described in Gao Y et al., Genome Biol. 2017; 18:13). Endogenous retrovirus genes may be modified or removed for xenotransplantation such as described in Yang L, et al. Science. 2015; 350:1101-4; Niu D et al., Science. 2017; 357:1303-7). Negative regulators of muscle mass (e.g., Myostatin) may be modified (e.g., inactivated) to increase muscle mass, e.g., in dogs (as described in Zou Q et al., J Mol Cell Biol. 2015 December; 7(6):580-3).

[0547] Animals such as pigs with severe combined immunodeficiency (SCID) may generated (e.g., by modifying RAG2) to provide useful models for regenerative medicine, xenotransplantation (discussed also elsewhere herein), and tumor development. Examples of methods and approaches include those described Lee K, et al., Proc Natl Acad Sci USA. 2014 May 20; 111(20):7260-5; and Schomberg et al. FASEB Journal, April 2016; 30(1):Suppl 571.1.

[0548] SNPs in the animals may be modified. Examples of methods and approaches include those described Tan W. et al., Proc Natl Acad Sci USA. 2013 Oct. 8; 110(41):16526-31; Mali P, et al., Science. 2013 Feb. 15; 339(6121):823-6.

[0549] Stem cells (e.g., induced pluripotent stem cells) may be modified and differentiated into desired progeny cells, e.g., as described in Heo Y T et al., Stem Cells Dev. 2015 Feb. 1; 24(3):393-402.

[0550] Profile analysis (such as Igenity) may be performed on animals to screen and identify genetic variations related to economic traits. The genetic variations may be modified to introduce or improve the traits, such as carcass composition, carcass quality, maternal and reproductive traits and average daily gain.

### Models of Genetic and Epigenetic Conditions

[0551] A method of the invention may be used to create a plant, an animal or cell that may be used to model and/or study genetic or epigenetic conditions of interest, such as a through a model of mutations of interest or a disease model. As used herein, “disease” refers to a disease, disorder, or indication in a subject. For example, a method of the invention may be used to create an animal or cell that comprises a modification in one or more nucleic acid sequences associated with a disease, or a plant, animal or cell in which the expression of one or more nucleic acid sequences associated with a disease are altered. Such a nucleic acid sequence may encode a disease associated protein sequence or may be a disease associated control sequence. Accordingly, it is understood that in embodiments of the invention, a plant, subject, patient, organism or cell can be a non-human subject, patient, organism or cell. Thus, the invention provides a plant, animal or cell, produced by the present methods, or a progeny thereof. The progeny may be a clone of the produced plant or animal, or may result from sexual reproduction by crossing with other individuals of the same species to introgress further desirable traits into their offspring. The cell may be in vivo or ex vivo in the cases of multicellular organisms, particularly animals or plants. In the instance where the cell is in cultured, a cell line may be established if appropriate culturing conditions are met and preferably if the cell is suitably adapted for this purpose (for instance a stem cell). Bacterial cell lines produced by the invention are also envisaged. Hence, cell lines are also envisaged.

[0552] In some methods, the disease model can be used to study the effects of mutations on the animal or cell and development and/or progression of the disease using measures commonly used in the study of the disease. Alternatively, such a disease model is useful for studying the effect of a pharmaceutically active compound on the disease.

[0553] In some methods, the disease model can be used to assess the efficacy of a potential gene therapy strategy. That is, a disease-associated gene or polynucleotide can be modified such that the disease development and/or progression is inhibited or reduced. In particular, the method comprises modifying a disease-associated gene or polynucleotide such that an altered protein is produced and, as a result, the animal or cell has an altered response. Accordingly, in some methods, a genetically modified animal may be compared with an animal predisposed to development of the disease such that the effect of the gene therapy event may be assessed.

[0554] In another embodiment, this invention provides a method of developing a biologically active agent that modulates a cell signaling event associated with a disease gene. The method comprises contacting a test compound with a cell comprising one or more vectors that drive expression of one or more of components of the system; and detecting a change in a readout that is indicative of a reduction or an augmentation of a cell signaling event associated with, e.g., a mutation in a disease gene contained in the cell.

[0555] A cell model or animal model can be constructed in combination with the method of the invention for screening a cellular function change. Such a model may be used to study the effects of a genome sequence modified by the systems and methods herein on a cellular function of interest. For example, a cellular function model may be used to study the effect of a modified genome sequence on intracellular signaling or extracellular signaling. Alternatively, a cellular function model may be used to study the effects of a modified genome sequence on sensory perception. In some such models, one or more genome sequences associated with a signaling biochemical pathway in the model are modified.

[0556] Several disease models have been specifically investigated. These include de novo autism risk genes CHD8, KATNAL2, and SCN2A; and the syndromic autism (Angelman Syndrome) gene UBE3A. These genes and resulting autism models are of course preferred, but serve to show the broad applicability of the invention across genes and corresponding models. An altered expression of one or more genome sequences associated with a signaling biochemical pathway can be determined by assaying for a difference in the mRNA levels of the corresponding genes between the test model cell and a control cell, when they are contacted with a candidate agent. Alternatively, the differential expression of the sequences associated with a signaling biochemical pathway is determined by detecting a difference in the level of the encoded polypeptide or gene product.

[0557] To assay for an agent-induced alteration in the level of mRNA transcripts or corresponding polynucleotides, nucleic acid contained in a sample is first extracted according to standard methods in the art. For instance, mRNA can be isolated using various lytic enzymes or chemical solutions according to the procedures set forth in Sambrook et al. (1989), or extracted by nucleic-acid-binding resins following the accompanying instructions provided by the manufacturers. The mRNA contained in the extracted nucleic acid sample is then detected by amplification procedures or conventional hybridization assays (e.g. Northern blot analysis) according to methods widely known in the art or based on the methods exemplified herein.

[0558] For purpose of this invention, amplification means any method employing a primer and a polymerase capable of replicating a target sequence with reasonable fidelity. Amplification may be carried out by natural or recombinant DNA polymerases such as TaqGold™, T7 DNA polymerase, Klenow fragment of E. coli DNA polymerase, and reverse transcriptase. A preferred amplification method is PCR. In particular, the isolated RNA can be subjected to a reverse transcription assay that is coupled with a quantitative polymerase chain reaction (RT-PCR) in order to quantify the expression level of a sequence associated with a signaling biochemical pathway.

[0559] Detection of the gene expression level can be conducted in real time in an amplification assay. In one aspect, the amplified products can be directly visualized with fluorescent DNA-binding agents including but not limited to DNA intercalators and DNA groove binders. Because the amount of the intercalators incorporated into the double-stranded DNA molecules is typically proportional to the amount of the amplified DNA products, one can conveniently determine the amount of the amplified products by quantifying the fluorescence of the intercalated dye using conventional optical systems in the art. DNA-binding dye suitable for this application include SYBR green, SYBR blue, DAPI, propidium iodine, Hoeste, SYBR gold, ethidium bromide, acridines, proflavine, acridine orange, acriflavine, fluorcoumanin, ellipticine, daunomycin, chloroquine, distamycin D, chromomycin, homidium, mithramycin, ruthenium polypyridyls, anthramycin, and the like.

[0560] In another aspect, other fluorescent labels such as sequence specific probes can be employed in the amplification reaction to facilitate the detection and quantification of the amplified products. Probe-based quantitative amplification relies on the sequence-specific detection of a desired amplified product. It utilizes fluorescent, target-specific probes (e.g., TaqMan® probes) resulting in increased specificity and sensitivity. Methods for performing probe-based quantitative amplification are well established in the art and are taught in U.S. Pat. No. 5,210,015.

[0561] In yet another aspect, conventional hybridization assays using hybridization probes that share sequence homology with sequences associated with a signaling biochemical pathway can be performed. Typically, probes are allowed to form stable complexes with the sequences associated with a signaling biochemical pathway contained within the biological sample derived from the test subject in a hybridization reaction. It will be appreciated by one of skill in the art that where antisense is used as the probe nucleic acid, the target polynucleotides provided in the sample are chosen to be complementary to sequences of the antisense nucleic acids. Conversely, where the nucleotide probe is a sense nucleic acid, the target polynucleotide is selected to be complementary to sequences of the sense nucleic acid.

[0562] Hybridization can be performed under conditions of various stringency. Suitable hybridization conditions for the practice of the present invention are such that the recognition interaction between the probe and sequences associated with a signaling biochemical pathway is both sufficiently specific and sufficiently stable. Conditions that increase the stringency of a hybridization reaction are widely known and published in the art. See, for example, (Sambrook, et al., (1989); Nonradioactive In Situ Hybridization Application Manual, Boehringer Mannheim, second edition). The hybridization assay can be formed using probes immobilized on any solid support, including but are not limited to nitrocellulose, glass, silicon, and a variety of gene arrays. A preferred hybridization assay is conducted on high-density gene chips as described in U.S. Pat. No. 5,445,934.

[0563] For a convenient detection of the probe-target complexes formed during the hybridization assay, the nucleotide probes are conjugated to a detectable label. Detectable labels suitable for use in the present invention include any composition detectable by photochemical, biochemical, spectroscopic, immunochemical, electrical, optical or chemical means. A wide variety of appropriate detectable labels are known in the art, which include fluorescent or chemiluminescent labels, radioactive isotope labels, enzymatic or other ligands. In preferred embodiments, one will likely desire to employ a fluorescent label or an enzyme tag, such as digoxigenin, ß-galactosidase, urease, alkaline phosphatase or peroxidase, avidin/biotin complex.

[0564] The detection methods used to detect or quantify the hybridization intensity will typically depend upon the label selected above. For example, radiolabels may be detected using photographic film or a phosphoimager. Fluorescent markers may be detected and quantified using a photodetector to detect emitted light. Enzymatic labels are typically detected by providing the enzyme with a substrate and measuring the reaction product produced by the action of the enzyme on the substrate; and finally colorimetric labels are detected by simply visualizing the colored label.

[0565] An agent-induced change in expression of sequences associated with a signaling biochemical pathway can also be determined by examining the corresponding gene products. Determining the protein level typically involves a) contacting the protein contained in a biological sample with an agent that specifically bind to a protein associated with a signaling biochemical pathway; and (b) identifying any agent:protein complex so formed. In one aspect of this embodiment, the agent that specifically binds a protein associated with a signaling biochemical pathway is an antibody, preferably a monoclonal antibody.

[0566] The reaction is performed by contacting the agent with a sample of the proteins associated with a signaling biochemical pathway derived from the test samples under conditions that will allow a complex to form between the agent and the proteins associated with a signaling biochemical pathway. The formation of the complex can be detected directly or indirectly according to standard procedures in the art. In the direct detection method, the agents are supplied with a detectable label and unreacted agents may be removed from the complex; the amount of remaining label thereby indicating the amount of complex formed. For such method, it is preferable to select labels that remain attached to the agents even during stringent washing conditions. It is preferable that the label does not interfere with the binding reaction. In the alternative, an indirect detection procedure may use an agent that contains a label introduced either chemically or enzymatically. A desirable label generally does not interfere with binding or the stability of the resulting agent:polypeptide complex. However, the label is typically designed to be accessible to an antibody for an effective binding and hence generating a detectable signal.

[0567] A wide variety of labels suitable for detecting protein levels are known in the art. Non-limiting examples include radioisotopes, enzymes, colloidal metals, fluorescent compounds, bioluminescent compounds, and chemiluminescent compounds.

[0568] The amount of agent:polypeptide complexes formed during the binding reaction can be quantified by standard quantitative assays. As illustrated above, the formation of agent:polypeptide complex can be measured directly by the amount of label remained at the site of binding. In an alternative, the protein associated with a signaling biochemical pathway is tested for its ability to compete with a labeled analog for binding sites on the specific agent. In this competitive assay, the amount of label captured is inversely proportional to the amount of protein sequences associated with a signaling biochemical pathway present in a test sample.

[0569] A number of techniques for protein analysis based on the general principles outlined above are available in the art. They include but are not limited to radioimmunoassays, ELISA (enzyme linked immunoradiometric assays), “sandwich” immunoassays, immunoradiometric assays, in situ immunoassays (using e.g., colloidal gold, enzyme or radioisotope labels), western blot analysis, immunoprecipitation assays, immunofluorescent assays, and SDS-PAGE.

[0570] Antibodies that specifically recognize or bind to proteins associated with a signaling biochemical pathway are preferable for conducting the aforementioned protein analyses. Where desired, antibodies that recognize a specific type of post-translational modifications (e.g., signaling biochemical pathway inducible modifications) can be used. Post-translational modifications include but are not limited to glycosylation, lipidation, acetylation, and phosphorylation. These antibodies may be purchased from commercial vendors. For example, anti-phosphotyrosine antibodies that specifically recognize tyrosine-phosphorylated proteins are available from a number of vendors including Invitrogen and Perkin Elmer. Anti-phosphotyrosine antibodies are particularly useful in detecting proteins that are differentially phosphorylated on their tyrosine residues in response to an ER stress. Such proteins include but are not limited to eukaryotic translation initiation factor 2 alpha (eIF-2a). Alternatively, these antibodies can be generated using conventional polyclonal or monoclonal antibody technologies by immunizing a host animal or an antibody-producing cell with a target protein that exhibits the desired post-translational modification.

[0571] In practicing the subject method, it may be desirable to discern the expression pattern of an protein associated with a signaling biochemical pathway in different bodily tissue, in different cell types, and/or in different subcellular structures. These studies can be performed with the use of tissue-specific, cell-specific or subcellular structure specific antibodies capable of binding to protein markers that are preferentially expressed in certain tissues, cell types, or subcellular structures.

[0572] An altered expression of a gene associated with a signaling biochemical pathway can also be determined by examining a change in activity of the gene product relative to a control cell. The assay for an agent-induced change in the activity of a protein associated with a signaling biochemical pathway will dependent on the biological activity and/or the signal transduction pathway that is under investigation. For example, where the protein is a kinase, a change in its ability to phosphorylate the downstream substrate(s) can be determined by a variety of assays known in the art. Representative assays include but are not limited to immunoblotting and immunoprecipitation with antibodies such as anti-phosphotyrosine antibodies that recognize phosphorylated proteins. In addition, kinase activity can be detected by high throughput chemiluminescent assays such as AlphaScreen™ (available from Perkin Elmer) and eTag™ assay (Chan-Hui, et al. (2003) Clinical Immunology 111: 162-174).

[0573] Where the protein associated with a signaling biochemical pathway is part of a signaling cascade leading to a fluctuation of intracellular pH condition, pH sensitive molecules such as fluorescent pH dyes can be used as the reporter molecules. In another example where the protein associated with a signaling biochemical pathway is an ion channel, fluctuations in membrane potential and/or intracellular ion concentration can be monitored. A number of commercial kits and high-throughput devices are particularly suited for a rapid and robust screening for modulators of ion channels. Representative instruments include FLIPR™ (Molecular Devices, Inc.) and VIPR (Aurora Biosciences). These instruments are capable of detecting reactions in over 1000 sample wells of a microplate simultaneously, and providing real-time measurement and functional data within a second or even a millisecond.

[0574] In practicing any of the methods disclosed herein, a suitable vector can be introduced to a cell or an embryo via one or more methods known in the art, including without limitation, microinjection, electroporation, sonoporation, biolistics, calcium phosphate-mediated transfection, cationic transfection, liposome transfection, dendrimer transfection, heat shock transfection, nucleofection transfection, magnetofection, lipofection, impalefection, optical transfection, proprietary agent-enhanced uptake of nucleic acids, and delivery via liposomes, immunoliposomes, virosomes, or artificial virions. In some methods, the vector is introduced into an embryo by microinjection. The vector or vectors may be microinjected into the nucleus or the cytoplasm of the embryo. In some methods, the vector or vectors may be introduced into a cell by nucleofection.

[0575] The target polynucleotide of a CRISPR complex can be any polynucleotide endogenous or exogenous to the eukaryotic cell. For example, the target polynucleotide can be a polynucleotide residing in the nucleus of the eukaryotic cell. The target polynucleotide can be a sequence coding a gene product (e.g., a protein) or a non-coding sequence (e.g., a regulatory polynucleotide or a junk DNA).

[0576] Examples of target polynucleotides include a sequence associated with a signaling biochemical pathway, e.g., a signaling biochemical pathway-associated gene or polynucleotide. Examples of target polynucleotides include a disease associated gene or polynucleotide. A “disease-associated” gene or polynucleotide refers to any gene or polynucleotide which is yielding transcription or translation products at an abnormal level or in an abnormal form in cells derived from a disease-affected tissues compared with tissues or cells of a non-disease control. It may be a gene that becomes expressed at an abnormally high level; it may be a gene that becomes expressed at an abnormally low level, where the altered expression correlates with the occurrence and/or progression of the disease. A disease-associated gene also refers to a gene possessing mutation(s) or genetic variation that is directly responsible or is in linkage disequilibrium with a gene(s) that is responsible for the etiology of a disease. The transcribed or translated products may be known or unknown, and may be at a normal or abnormal level.

[0577] The target polynucleotide of the system herein can be any polynucleotide endogenous or exogenous to the eukaryotic cell. For example, the target polynucleotide can be a polynucleotide residing in the nucleus of the eukaryotic cell. The target polynucleotide can be a sequence coding a gene product (e.g., a protein) or a non-coding sequence (e.g., a regulatory polynucleotide or a junk DNA). Without wishing to be bound by theory, it is believed that the target sequence should be associated with a PAM (protospacer adjacent motif); that is, a short sequence recognized by the CRISPR complex. The precise sequence and length requirements for the PAM differ depending on the CRISPR enzyme used, but PAMs are typically 2-5 base pair sequences adjacent the protospacer (that is, the target sequence) Examples of PAM sequences are given in the examples section below, and the skilled person will be able to identify further PAM sequences for use with a given CRISPR enzyme. Further, engineering of the PAM Interacting (PI) domain may allow programing of PAM specificity, improve target site recognition fidelity, and increase the versatility of the Cas, e.g. Cas9, genome engineering platform. Cas proteins, such as Cas9 proteins may be engineered to alter their PAM specificity, for example as described in Kleinstiver B P et al. Engineered CRISPR-Cas9 nucleases with altered PAM specificities. Nature. 2015 Jul. 23; 523(7561):481-5. doi: 10.1038/nature14592.

[0578] The target polynucleotide of the system may include a number of disease-associated genes and polynucleotides as well as signaling biochemical pathway-associated genes and polynucleotides as listed in U.S. provisional patent applications 61/736,527 and 61/748,427 having Broad reference BI-2011/008/WSGR Docket No. 44063-701.101 and BI-2011/008/WSGR Docket No. 44063-701.102 respectively, both entitled SYSTEMS METHODS AND COMPOSITIONS FOR SEQUENCE MANIPULATION filed on Dec. 12, 2012 and Jan. 2, 2013, respectively, and PCT Application PCT/US2013/074667, entitled DELIVERY, ENGINEERING AND OPTIMIZATION OF SYSTEMS, METHODS AND COMPOSITIONS FOR SEQUENCE MANIPULATION AND THERAPEUTIC APPLICATIONS, filed Dec. 12, 2013, the contents of all of which are herein incorporated by reference in their entirety.

[0579] Examples of target polynucleotides include a sequence associated with a signaling biochemical pathway, e.g., a signaling biochemical pathway-associated gene or polynucleotide. Examples of target polynucleotides include a disease associated gene or polynucleotide. A “disease-associated” gene or polynucleotide refers to any gene or polynucleotide which is yielding transcription or translation products at an abnormal level or in an abnormal form in cells derived from a disease-affected tissues compared with tissues or cells of a non-disease control. It may be a gene that becomes expressed at an abnormally high level; it may be a gene that becomes expressed at an abnormally low level, where the altered expression correlates with the occurrence and/or progression of the disease. A disease-associated gene also refers to a gene possessing mutation(s) or genetic variation that is directly responsible or is in linkage disequilibrium with a gene(s) that is responsible for the etiology of a disease. The transcribed or translated products may be known or unknown, and may be at a normal or abnormal level.

### Therapeutic Applications

[0580] Also provided herein are methods of diagnosing, prognosing, treating, and/or preventing a disease, state, or condition in or of a subject. Generally, the methods of diagnosing, prognosing, treating, and/or preventing a disease, state, or condition in or of a subject can include modifying a polynucleotide in a subject or cell thereof using a composition, system, or component thereof described herein and/or include detecting a diseased or healthy polynucleotide in a subject or cell thereof using a composition, system, or component thereof described herein. In some embodiments, the method of treatment or prevention can include using a composition, system, or component thereof to modify a polynucleotide of an infectious organism (e.g. bacterial or virus) within a subject or cell thereof. In some embodiments, the method of treatment or prevention can include using a composition, system, or component thereof to modify a polynucleotide of an infectious organism or symbiotic organism within a subject. The composition, system, and components thereof can be used to develop models of diseases, states, or conditions. The composition, system, and components thereof can be used to detect a disease state or correction thereof, such as by a method of treatment or prevention described herein. The composition, system, and components thereof can be used to screen and select cells that can be used, for example, as treatments or preventions described herein. The composition, system, and components thereof can be used to develop biologically active agents that can be used to modify one or more biologic functions or activities in a subject or a cell thereof.

[0581] In general, the method can include delivering a composition, system, and/or component thereof to a subject or cell thereof, or to an infectious or symbiotic organism by a suitable delivery technique and/or composition. Once administered the components can operate as described elsewhere herein to elicit a nucleic acid modification event. In some aspects, the nucleic acid modification event can occur at the genomic, epigenomic, and/or transcriptomic level. DNA and/or RNA cleavage, gene activation, and/or gene deactivation can occur. Additional features, uses, and advantages are described in greater detail below. On the basis of this concept, several variations are appropriate to elicit a genomic locus event, including DNA cleavage, gene activation, or gene deactivation. Using the provided compositions, the person skilled in the art can advantageously and specifically target single or multiple loci with the same or different functional domains to elicit one or more genomic locus events. In addition to treating and/or preventing a disease in a subject, the compositions may be applied in a wide variety of methods for screening in libraries in cells and functional modeling in vivo (e.g., gene activation of lincRNA and identification of function; gain-of-function modeling; loss-of-function modeling; the use the compositions of the invention to establish cell lines and transgenic animals for optimization and screening purposes).

[0582] The composition, system, and components thereof described elsewhere herein can be used to treat and/or prevent a disease, such as a genetic and/or epigenetic disease, in a subject. The composition, system, and components thereof described elsewhere herein can be used to treat and/or prevent genetic infectious diseases in a subject, such as bacterial infections, viral infections, fungal infections, parasite infections, and combinations thereof. The composition, system, and components thereof described elsewhere herein can be used to modify the composition or profile of a microbiome in a subject, which can in turn modify the health status of the subject. The composition, system, described herein can be used to modify cells ex vivo, which can then be administered to the subject whereby the modified cells can treat or prevent a disease or symptom thereof. This is also referred to in some contexts as adoptive therapy. The composition, system, described herein can be used to treat mitochondrial diseases, where the mitochondrial disease etiology involves a mutation in the mitochondrial DNA.

[0583] Also provided is a method of treating a subject, e.g., a subject in need thereof, comprising inducing gene editing by transforming the subject with the polynucleotide encoding one or more components of the composition, system, or complex or any of polynucleotides or vectors described herein and administering them to the subject. A suitable repair template may also be provided, for example delivered by a vector comprising said repair template. Also provided is a method of treating a subject, e.g., a subject in need thereof, comprising inducing transcriptional activation or repression of multiple target gene loci by transforming the subject with the polynucleotides or vectors described herein, wherein said polynucleotide or vector encodes or comprises one or more components of composition, system, complex or component thereof comprising multiple Cas effectors. Where any treatment is occurring ex vivo, for example in a cell culture, then it will be appreciated that the term ‘subject’ may be replaced by the phrase “cell or cell culture.”

[0584] Also provided is a method of treating a subject, e.g., a subject in need thereof, comprising inducing gene editing by transforming the subject with the Cas effector(s), advantageously encoding and expressing in vivo the remaining portions of the composition, system, (e.g., RNA, guides). A suitable repair template may also be provided, for example delivered by a vector comprising said repair template. Also provided is a method of treating a subject, e.g., a subject in need thereof, comprising inducing transcriptional activation or repression by transforming the subject with the Cas effector(s) advantageously encoding and expressing in vivo the remaining portions of the composition, system, (e.g., RNA, guides); advantageously in some embodiments the CRISPR enzyme is a catalytically inactive Cas effector and includes one or more associated functional domains. Where any treatment is occurring ex vivo, for example in a cell culture, then it will be appreciated that the term ‘subject’ may be replaced by the phrase “cell or cell culture.”

[0585] One or more components of the composition and system described herein can be included in a composition, such as a pharmaceutical composition, and administered to a host individually or collectively. Alternatively, these components may be provided in a single composition for administration to a host. Administration to a host may be performed via viral vectors known to the skilled person or described herein for delivery to a host (e.g. lentiviral vector, adenoviral vector, AAV vector). As explained herein, use of different selection markers (e.g. for lentiviral gRNA selection) and concentration of gRNA (e.g. dependent on whether multiple gRNAs are used) may be advantageous for eliciting an improved effect.

[0586] Thus, also described herein are methods of inducing one or more polynucleotide modifications in a eukaryotic or prokaryotic cell or component thereof (e.g. a mitochondria) of a subject, infectious organism, and/or organism of the microbiome of the subject. The modification can include the introduction, deletion, or substitution of one or more nucleotides at a target sequence of a polynucleotide of one or more cell(s). The modification can occur in vitro, ex vivo, in situ, or in vivo.

[0587] In some embodiments, the method of treating or inhibiting a condition or a disease caused by one or more mutations in a genomic locus in a eukaryotic organism or a non-human organism can include manipulation of a target sequence within a coding, non-coding or regulatory element of said genomic locus in a target sequence in a subject or a non-human subject in need thereof comprising modifying the subject or a non-human subject by manipulation of the target sequence and wherein the condition or disease is susceptible to treatment or inhibition by manipulation of the target sequence including providing treatment comprising delivering a composition comprising the particle delivery system or the delivery system or the virus particle of any one of the above embodiment or the cell of any one of the above embodiment.

[0588] Also provided herein is the use of the particle delivery system or the delivery system or the virus particle of any one of the above embodiment or the cell of any one of the above embodiment in ex vivo or in vivo gene or genome editing; or for use in in vitro, ex vivo or in vivo gene therapy. Also provided herein are particle delivery systems, non-viral delivery systems, and/or the virus particle of any one of the above embodiments or the cell of any one of the above embodiments used in the manufacture of a medicament for in vitro, ex vivo or in vivo gene or genome editing or for use in in vitro, ex vivo or in vivo gene therapy or for use in a method of modifying an organism or a non-human organism by manipulation of a target sequence in a genomic locus associated with a disease or in a method of treating or inhibiting a condition or disease caused by one or more mutations in a genomic locus in a eukaryotic organism or a non-human organism.

[0589] In some embodiments, polynucleotide modification can include the introduction, deletion, or substitution of 1-75 nucleotides at each target sequence of said polynucleotide of said cell(s). The modification can include the introduction, deletion, or substitution of at least 1, 5, 10, 11, 12, 13, 14, 15, 16, 17, 18, 19, 20, 21, 22, 23, 24, 25, 26, 27, 28, 29, 30, 35, 40, 45, 50, or 75 nucleotides at each target sequence. The modification can include the introduction, deletion, or substitution of at least 5, 10, 11, 12, 13, 14, 15, 16, 17, 18, 19, 20, 21, 22, 23, 24, 25, 26, 27, 28, 29, 30, 35, 40, 45, 50, or 75 nucleotides at each target sequence of said cell(s). The modification can include the introduction, deletion, or substitution of at least 10, 11, 12, 13, 14, 15, 16, 17, 18, 19, 20, 21, 22, 23, 24, 25, 26, 27, 28, 29, 30, 35, 40, 45, 50, or 75 nucleotides at each target sequence of said cell(s). The modification can include the introduction, deletion, or substitution of at least 20, 21, 22, 23, 24, 25, 26, 27, 28, 29, 30, 35, 40, 45, 50, or 75 nucleotides at each target sequence of said cell(s). The modification can include the introduction, deletion, or substitution of at least 40, 45, 50, 75, 100, 200, 300, 400 or 500 nucleotides at each target sequence of said cell(s). The modification can include the introduction, deletion, or substitution of at least 500, 600, 700, 800, 900, 1000, 1100, 1200, 1300, 1400, 1500, 1600, 1700, 1800, 1900, 2000, 2100, 2200, 2300, 2400, 2500, 2600, 2700, 2800, 2900, 3000, 3100, 3200, 3300, 3400, 3500, 3600, 3700, 3800, 3900, 4000, 4100, 4200, 4300, 4400, 4500, 4600, 4700, 4800, 4900, 5000, 5100, 5200, 5300, 5400, 5500, 5600, 5700, 5800, 5900, 6000, 6100, 6200, 6300, 6400, 6500, 6600, 6700, 6800, 6900, 7000, 7100, 7200, 7300, 7400, 7500, 7600, 7700, 7800, 7900, 8000, 8100, 8200, 8300, 8400, 8500, 8600, 8700, 8800, 8900, 9000, 9100, 9200, 9300, 9400, 9500, 9600, 9700, 9800, or 9900 to 10000 nucleotides at each target sequence of said cell(s).

[0590] In some embodiments, the modifications can include the introduction, deletion, or substitution of nucleotides at each target sequence of said cell(s) via nucleic acid components (e.g. guide(s) RNA(s) or sgRNA(s)), such as those mediated by a composition, system, or a component thereof described elsewhere herein. In some embodiments, the modifications can include the introduction, deletion, or substitution of nucleotides at a target or random sequence of said cell(s) via a composition, system, or technique.

[0591] The target sequences of polynucleotides to be modified to treat or prevent disease are described in greater detail below.

[0592] As is also discussed elsewhere herein, the composition, system, can include a template polynucleotide (also referred to herein as template nucleic acids or template sequence). In an embodiment, the template nucleic acid alters the structure of the target position by participating in homologous recombination. In an embodiment, the template nucleic acid alters the sequence of the target position. In an embodiment, the template nucleic acid results in the incorporation of a modified, or non-naturally occurring base into the target nucleic acid.

[0593] The template sequence may undergo a breakage mediated or catalyzed recombination with the target sequence. In an embodiment, the template nucleic acid can include sequence that corresponds to a site on the target sequence that is cleaved, nicked, or otherwise modified by one or more Cas effector mediated cleavage event(s). In an embodiment, the template nucleic acid can include sequence that corresponds to both, a first site on the target sequence that is cleaved, nicked, or otherwise modified in a first Cas effector mediated event, and a second site on the target sequence that is cleaved in a second Cas effector mediated event.

[0594] In certain embodiments, the template nucleic acid can include a sequence which results in an alteration in the coding sequence of a translated sequence, e.g., one which results in the substitution of one amino acid for another in a protein product, e.g., transforming a mutant allele into a wild type allele, transforming a wild type allele into a mutant allele, and/or introducing a stop codon, insertion of an amino acid residue, deletion of an amino acid residue, or a nonsense mutation. In certain embodiments, the template nucleic acid can include sequence which results in an alteration in a non-coding sequence, e.g., an alteration in an exon or in a 5′ or 3′ non-translated or non-transcribed region. Such alterations include an alteration in a control element, e.g., a promoter, enhancer, and an alteration in a cis-acting or trans-acting control element.

[0595] A template nucleic acid having homology with a target position in a target gene may be used to alter the structure of a target sequence. The template sequence may be used to alter an unwanted structure, e.g., an unwanted or mutant nucleotide. The template nucleic acid may include sequence which, when integrated, results in: decreasing the activity of a positive control element; increasing the activity of a positive control element; decreasing the activity of a negative control element; increasing the activity of a negative control element; decreasing the expression of a gene; increasing the expression of a gene; increasing resistance to a disorder or disease; increasing resistance to viral entry; correcting a mutation or altering an unwanted amino acid residue conferring, increasing, abolishing or decreasing a biological property of a gene product, e.g., increasing the enzymatic activity of an enzyme, or increasing the ability of a gene product to interact with another molecule.

[0596] The template nucleic acid may include sequence which results in: a change in sequence of 1, 2, 3, 4, 5, 6, 7, 8, 9, 10, 11, 12 or more nucleotides of the target sequence. In an embodiment, the template nucleic acid may be 20+/−10, 30+/−10, 40+/−10, 50+/−10, 60+/−10, 70+/−10, 80+/−10, 9 0+/−10, 100+/−10, 110+/−10, 120+/−10, 130+/−10, 140+/−10, 150+/−10, 160+/−10, 170+/−10, 1 80+/−10, 190+/−10, 200+/−10, 210+/−10, of 220+/−10 nucleotides in length. In an embodiment, the template nucleic acid may be 30+/−20, 40+/−20, 50+/−20, 60+/−20, 70+/−20, 80+/−20, 90+/−20, 100+/−20, 110+/−20, 120+/−20, 130+/−20, 140+/−20, 150+/−20, 160+/−20, 170+/−20, 180+/−20, 190+/−20, 200+/−20, 210+/−20, of 220+/−20 nucleotides in length. In an embodiment, the template nucleic acid is 10 to 1,000, 20 to 900, 30 to 800, 40 to 700, 50 to 600, 50 to 500, 50 to 400, 50 to300, 50 to 200, or 50 to 100 nucleotides in length.

[0597] A template nucleic acid comprises the following components: [5′ homology arm]-[replacement sequence]-[3′ homology arm]. The homology arms provide for recombination into the chromosome, thus replacing the undesired element, e.g., a mutation or signature, with the replacement sequence. In an embodiment, the homology arms flank the most distal cleavage sites. In an embodiment, the 3′ end of the 5′ homology arm is the position next to the 5′ end of the replacement sequence. In an embodiment, the 5′ homology arm can extend at least 10, 20, 30, 40, 50, 100, 200, 300, 400, 500, 600, 700, 800, 900, 1000, 1500, or 2000 nucleotides 5′ from the 5′ end of the replacement sequence. In an embodiment, the 5′ end of the 3′ homology arm is the position next to the 3′ end of the replacement sequence. In an embodiment, the 3′ homology arm can extend at least 10, 20, 30, 40, 50, 100, 200, 300, 400, 500, 600, 700, 800, 900, 1000, 1500, or 2000 nucleotides 3′ from the 3′ end of the replacement sequence.

[0598] In certain embodiments, one or both homology arms may be shortened to avoid including certain sequence repeat elements. For example, a 5′ homology arm may be shortened to avoid a sequence repeat element. In other embodiments, a 3′ homology arm may be shortened to avoid a sequence repeat element. In some embodiments, both the 5′ and the 3′ homology arms may be shortened to avoid including certain sequence repeat elements.

[0599] In certain embodiments, a template nucleic acids for correcting a mutation may designed for use as a single-stranded oligonucleotide. When using a single-stranded oligonucleotide, 5′ and 3′ homology arms may range up to about 200 base pairs (bp) in length, e.g., at least 25, 50, 75, 100, 125, 150, 175, or 200 bp in length.

[0600] In some embodiments, the composition, system, or component thereof can promote Non-Homologous End-Joining (NHEJ). In some embodiments, modification of a polynucleotide by a composition, system, or a component thereof, such as a diseased polynucleotide, can include NHEJ. In some embodiments, promotion of this repair pathway by the composition, system, or a component thereof can be used to target gene or polynucleotide specific knock-outs and/or knock-ins. In some embodiments, promotion of this repair pathway by the composition, system, or a component thereof can be used to generate NHEJ-mediated indels. Nuclease-induced NHEJ can also be used to remove (e.g., delete) sequence in a gene of interest. Generally, NHEJ repairs a double-strand break in the DNA by joining together the two ends; however, generally, the original sequence is restored only if two compatible ends, exactly as they were formed by the double-strand break, are perfectly ligated. The DNA ends of the double-strand break are frequently the subject of enzymatic processing, resulting in the addition or removal of nucleotides, at one or both strands, prior to rejoining of the ends. This results in the presence of insertion and/or deletion (indel) mutations in the DNA sequence at the site of the NHEJ repair. The indel can range in size from 1-50 or more base pairs. In some embodiments thee indel can be 1, 2, 3, 4, 5, 6, 7, 8, 9, 10, 11, 12, 13, 14, 15, 16, 17, 18, 19, 20, 21, 22, 23, 24, 25, 26, 27, 28, 29, 30, 31, 32, 33, 34, 35, 36, 37, 38, 39, 40, 41, 42, 43, 44, 45, 46, 47, 48, 49, 50, 51, 52, 53, 54, 55, 56, 57, 58, 59, 60, 61, 62, 63, 64, 65, 66, 67, 68, 69, 70, 71, 72, 73, 74, 75, 76, 77, 78, 79, 80, 81, 82, 83, 84, 85, 86, 87, 88, 89, 90, 91, 92, 93, 94, 95, 96, 97, 98, 99, 100, 101, 102, 103, 104, 105, 106, 107, 108, 109, 110, 111, 112, 113, 114, 115, 116, 117, 118, 119, 120, 121, 122, 123, 124, 125, 126, 127, 128, 129, 130, 131, 132, 133, 134, 135, 136, 137, 138, 139, 140, 141, 142, 143, 144, 145, 146, 147, 148, 149, 150, 151, 152, 153, 154, 155, 156, 157, 158, 159, 160, 161, 162, 163, 164, 165, 166, 167, 168, 169, 170, 171, 172, 173, 174, 175, 176, 177, 178, 179, 180, 181, 182, 183, 184, 185, 186, 187, 188, 189, 190, 191, 192, 193, 194, 195, 196, 197, 198, 199, 200, 201, 202, 203, 204, 205, 206, 207, 208, 209, 210, 211, 212, 213, 214, 215, 216, 217, 218, 219, 220, 221, 222, 223, 224, 225, 226, 227, 228, 229, 230, 231, 232, 233, 234, 235, 236, 237, 238, 239, 240, 241, 242, 243, 244, 245, 246, 247, 248, 249, 250, 251, 252, 253, 254, 255, 256, 257, 258, 259, 260, 261, 262, 263, 264, 265, 266, 267, 268, 269, 270, 271, 272, 273, 274, 275, 276, 277, 278, 279, 280, 281, 282, 283, 284, 285, 286, 287, 288, 289, 290, 291, 292, 293, 294, 295, 296, 297, 298, 299, 300, 301, 302, 303, 304, 305, 306, 307, 308, 309, 310, 311, 312, 313, 314, 315, 316, 317, 318, 319, 320, 321, 322, 323, 324, 325, 326, 327, 328, 329, 330, 331, 332, 333, 334, 335, 336, 337, 338, 339, 340, 341, 342, 343, 344, 345, 346, 347, 348, 349, 350, 351, 352, 353, 354, 355, 356, 357, 358, 359, 360, 361, 362, 363, 364, 365, 366, 367, 368, 369, 370, 371, 372, 373, 374, 375, 376, 377, 378, 379, 380, 381, 382, 383, 384, 385, 386, 387, 388, 389, 390, 391, 392, 393, 394, 395, 396, 397, 398, 399, 400, 401, 402, 403, 404, 405, 406, 407, 408, 409, 410, 411, 412, 413, 414, 415, 416, 417, 418, 419, 420, 421, 422, 423, 424, 425, 426, 427, 428, 429, 430, 431, 432, 433, 434, 435, 436, 437, 438, 439, 440, 441, 442, 443, 444, 445, 446, 447, 448, 449, 450, 451, 452, 453, 454, 455, 456, 457, 458, 459, 460, 461, 462, 463, 464, 465, 466, 467, 468, 469, 470, 471, 472, 473, 474, 475, 476, 477, 478, 479, 480, 481, 482, 483, 484, 485, 486, 487, 488, 489, 490, 491, 492, 493, 494, 495, 496, 497, 498, 499, or 500 base pairs or more. If a double-strand break is targeted near to a short target sequence, the deletion mutations caused by the NHEJ repair often span, and therefore remove, the unwanted nucleotides. For the deletion of larger DNA segments, introducing two double-strand breaks, one on each side of the sequence, can result in NHEJ between the ends with removal of the entire intervening sequence. Both of these approaches can be used to delete specific DNA sequences.

[0601] In some embodiments, composition, system, mediated NHEJ can be used in the method to delete small sequence motifs. In some embodiments, composition, system, mediated NHEJ can be used in the method to generate NHEJ-mediate indels that can be targeted to the gene, e.g., a coding region, e.g., an early coding region of a gene of interest can be used to knockout (i.e., eliminate expression of) a gene of interest. For example, early coding region of a gene of interest includes sequence immediately following a transcription start site, within a first exon of the coding sequence, or within 500 bp of the transcription start site (e.g., less than 500, 450, 400, 350, 300, 250, 200, 150, 100 or 50 bp). In an embodiment, in which a guide RNA and Cas effector generate a double strand break for the purpose of inducing NHEJ-mediated indels, a guide RNA may be configured to position one double-strand break in close proximity to a nucleotide of the target position. In an embodiment, the cleavage site may be between 0-500 bp away from the target position (e.g., less than 500, 400, 300, 200, 100, 50, 40, 30, 25, 20, 15, 10, 9, 8, 7, 6, 5, 4, 3, 2 or 1 bp from the target position). In an embodiment, in which two guide RNAs complexing with one or more Cas nickases induce two single strand breaks for the purpose of inducing NHEJ-mediated indels, two guide RNAs may be configured to position two single-strand breaks to provide for NHEJ repair a nucleotide of the target position.

[0602] For minimization of toxicity and off-target effect, it may be important to control the concentration of Cas mRNA and guide RNA delivered. Optimal concentrations of Cas mRNA and guide RNA can be determined by testing different concentrations in a cellular or non-human eukaryote animal model and using deep sequencing the analyze the extent of modification at potential off-target genomic loci. Alternatively, to minimize the level of toxicity and off-target effect, Cas nickase mRNA (for example S. pyogenes Cas9 with the D10A mutation) can be delivered with a pair of guide RNAs targeting a site of interest. Guide sequences and strategies to minimize toxicity and off-target effects can be as in WO 2014/093622 (PCT/US2013/074667); or, via mutation. Others are as described elsewhere herein.

[0603] Typically, in the context of an endogenous CRISPR or CAST system, formation of a CRISPR or CAST complex (comprising a guide sequence hybridized to a target sequence and complexed with one or more Cas proteins) results in cleavage, nicking, and/or another modification of one or both strands in or near (e.g. within 1, 2, 3, 4, 5, 6, 7, 8, 9, 10, 20, 50, or more base pairs from) the target sequence. In some embodiments, the tracr sequence, which may comprise or consist of all or a portion of a wild-type tracr sequence (e.g. about or more than about 20, 26, 32, 45, 48, 54, 63, 67, 85, or more nucleotides of a wild-type tracr sequence), can also form part of a CRISPR complex, such as by hybridization along at least a portion of the tracr sequence to all or a portion of a tracr mate sequence that is operably linked to the guide sequence.

[0604] In some embodiments, a method of modifying a target polynucleotide in a cell to treat or prevent a disease can include allowing a composition, system, or component thereof to bind to the target polynucleotide, e.g., to effect cleavage, nicking, or other modification as the composition, system, is capable of said target polynucleotide, thereby modifying the target polynucleotide, wherein the composition, system, or component thereof, complex with a guide sequence, and hybridize said guide sequence to a target sequence within the target polynucleotide, wherein said guide sequence is optionally linked to a tracr mate sequence, which in turn can hybridize to a tracr sequence. In some of these embodiments, the composition, system, or component thereof can be or include a CRISPR-Cas effector complexed with a guide sequence. In some embodiments, modification can include cleaving or nicking one or two strands at the location of the target sequence by one or more components of the composition, system, or component thereof.

[0605] The cleavage, nicking, or other modification capable of being performed by the composition, system, can modify transcription of a target polynucleotide. In some embodiments, modification of transcription can include decreasing transcription of a target polynucleotide. In some embodiments, modification can include increasing transcription of a target polynucleotide. In some embodiments, the method includes repairing said cleaved target polynucleotide by homologous recombination with an exogenous template polynucleotide, wherein said repair results in a modification such as, but not limited to, an insertion, deletion, or substitution of one or more nucleotides of said target polynucleotide. In some embodiments, said modification results in one or more amino acid changes in a protein expressed from a gene comprising the target sequence. In some embodiments, the modification imparted by the composition, system, or component thereof provides a transcript and/or protein that can correct a disease or a symptom thereof, including but not limited to, any of those described in greater detail elsewhere herein.

[0606] In some embodiments, the method of treating or preventing a disease can include delivering one or more vectors or vector systems to a cell, such as a eukaryotic or prokaryotic cell, wherein one or more vectors or vector systems include the composition, system, or component thereof. In some embodiments, the vector(s) or vector system(s) can be a viral vector or vector system, such as an AAV or lentiviral vector system, which are described in greater detail elsewhere herein. In some embodiments, the method of treating or preventing a disease can include delivering one or more viral particles, such as an AAV or lentiviral particle, containing the composition, system, or component thereof. In some embodiments, the viral particle has a tissue specific tropism. In some embodiments, the viral particle has a liver, muscle, eye, heart, pancreas, kidney, neuron, epithelial cell, endothelial cell, astrocyte, glial cell, immune cell, or red blood cell specific tropism.

[0607] It will be understood that the composition, system, according to the invention as described herein, such as the composition, system, for use in the methods according to the invention as described herein, may be suitably used for any type of application known for composition, system, preferably in eukaryotes. In certain aspects, the application is therapeutic, preferably therapeutic in a eukaryote organism, such as including but not limited to animals (including human), plants, algae, fungi (including yeasts), etc. Alternatively, or in addition, in certain aspects, the application may involve accomplishing or inducing one or more particular traits or characteristics, such as genotypic and/or phenotypic traits or characteristics, as also described elsewhere herein.

### Treating Diseases of the Circulatory System

[0608] In some embodiments, the composition, system, and/or component thereof described herein can be used to treat and/or prevent a circulatory system disease. Exemplary disease is provided, for example, in Tables 3 and 4. In some embodiments the plasma exosomes of Wahlgren et al. (Nucleic Acids Research, 2012, Vol. 40, No. 17 e130) can be used to deliver the composition, system, and/or component thereof described herein to the blood. In some embodiments, the circulatory system disease can be treated by using a lentivirus to deliver the composition, system, described herein to modify hematopoietic stem cells (HSCs) in vivo or ex vivo (see e.g. Drakopoulou, “Review Article, The Ongoing Challenge of Hematopoietic Stem Cell-Based Gene Therapy for β-Thalassemia,” Stem Cells International, Volume 2011, Article ID 987980, 10 pages, doi:10.4061/2011/987980, which can be adapted for use with the composition, system, herein in view of the description herein). In some embodiments, the circulatory system disorder can be treated by correcting HSCs as to the disease using a composition, system, herein or a component thereof, wherein the composition, system, optionally includes a suitable HDR repair template (see e.g. Cavazzana, “Outcomes of Gene Therapy for β-Thalassemia Major via Transplantation of Autologous Hematopoietic Stem Cells Transduced Ex Vivo with a Lentiviral βA-T87Q-Globin Vector.”; Cavazzana-Calvo, “Transfusion independence and HMGA2 activation after gene therapy of human 0-thalassaemia”, Nature 467, 318-322 (16 Sep. 2010) doi:10.1038/nature09328; Nienhuis, “Development of Gene Therapy for Thalassemia, Cold Spring Harbor Perspectives in Medicine, doi: 10.1101/cshperspect.a011833 (2012), LentiGlobin BB305, a lentiviral vector containing an engineered β-globin gene (βA-T87Q); and Xie et al., “Seamless gene correction of β-thalassaemia mutations in patient-specific iPSCs using CRISPR/Cas9 and piggyback” Genome Research gr.173427.114 (2014) http://www.genome.org/cgi/doi/10.1101/gr.173427.114 (Cold Spring Harbor Laboratory Press; [1599] Watts, “Hematopoietic Stem Cell Expansion and Gene Therapy” Cytotherapy 13(10):1164-1171. doi:10.3109/14653249.2011.620748 (2011), which can be adapted for use with the composition, system, herein in view of the description herein). In some embodiments, iPSCs can be modified using a composition, system, described herein to correct a disease polynucleotide associated with a circulatory disease. In this regard, the teachings of Xu et al. (Sci Rep. 2015 Jul. 9; 5:12065. doi: 10.1038/srep12065) and Song et al. (Stem Cells Dev. 2015 May 1; 24(9):1053-65. doi: 10.1089/scd.2014.0347. Epub 2015 Feb. 5) with respect to modifying iPSCs can be adapted for use in view of the description herein with the composition, system, described herein.

[0609] The term “Hematopoietic Stem Cell” or “HSC” refers broadly those cells considered to be an HSC, e.g., blood cells that give rise to all the other blood cells and are derived from mesoderm; located in the red bone marrow, which is contained in the core of most bones. HSCs of the invention include cells having a phenotype of hematopoietic stem cells, identified by small size, lack of lineage (lin) markers, and markers that belong to the cluster of differentiation series, like: CD34, CD38, CD90, CD133, CD105, CD45, and also c-kit, —the receptor for stem cell factor. Hematopoietic stem cells are negative for the markers that are used for detection of lineage commitment, and are, thus, called Lin−; and, during their purification by FACS, a number of up to 14 different mature blood-lineage markers, e.g., CD13 & CD33 for myeloid, CD71 for erythroid, CD19 for B cells, CD61 for megakaryocytic, etc. for humans; and, B220 (murine CD45) for B cells, Mac-1 (CD11b/CD18) for monocytes, Gr-1 for Granulocytes, Ter119 for erythroid cells, Il7Ra, CD3, CD4, CD5, CD8 for T cells, etc. Mouse HSC markers: CD34lo/−, SCA-1+, Thy1.1+/lo, CD38+, C-kit+, lin−, and Human HSC markers: CD34+, CD59+, Thy1/CD90+, CD38lo/−, C-kit/CD117+, and lin−. HSCs are identified by markers. Hence in embodiments discussed herein, the HSCs can be CD34+ cells. HSCs can also be hematopoietic stem cells that are CD34−/CD38−. Stem cells that may lack c-kit on the cell surface that are considered in the art as HSCs are within the ambit of the invention, as well as CD133+ cells likewise considered HSCs in the art.

[0610] The CRISPR-Cas (system may be engineered to target genetic locus or loci in HSCs. In some embodiments, the Cas effector(s) can be codon-optimized for a eukaryotic cell and especially a mammalian cell, e.g., a human cell, for instance, HSC, or iPSC and sgRNA targeting a locus or loci in HSC, such as circulatory disease, can be prepared. These may be delivered via particles. The particles may be formed by the Cas effector (e.g., Cas9) protein and the gRNA being admixed. The gRNA and Cas effector (e.g., Cas9) protein mixture can be, for example, admixed with a mixture comprising or consisting essentially of or consisting of surfactant, phospholipid, biodegradable polymer, lipoprotein and alcohol, whereby particles containing the gRNA and Cas effector (e.g. Cas9) protein may be formed. The invention comprehends so making particles and particles from such a method as well as uses thereof. Particles suitable delivery of the CRISRP-Cas systems in the context of blood or circulatory system or HSC delivery to the blood or circulatory system are described in greater detail elsewhere herein.

[0611] In some embodiments, after ex vivo modification the HSCs or iPCS can be expanded prior to administration to the subject. Expansion of HSCs can be via any suitable method such as that described by, Lee, “Improved ex vivo expansion of adult hematopoietic stem cells by overcoming CUL4-mediated degradation of HOXB4.” Blood. 2013 May 16; 121(20):4082-9. doi: 10.1182/blood-2012-09-455204. Epub 2013 Mar. 21.

[0612] In some embodiments, the HSCs or iPSCs modified can be autologous. In some embodiments, the HSCs or iPSCs can be allogenic. In addition to the modification of the disease gene(s), allogenic cells can be further modified using the composition, system, described herein to reduce the immunogenicity of the cells when delivered to the recipient. Such techniques are described elsewhere herein and e.g. Cartier, “MINI-SYMPOSIUM: X-Linked Adrenoleukodystrophypa, Hematopoietic Stem Cell Transplantation and Hematopoietic Stem Cell Gene Therapy in X-Linked Adrenoleukodystrophy,” Brain Pathology 20 (2010) 857-862, which can be adapted for use with the composition, system, herein.

### Treating Diseases of the Brain

[0613] In some embodiments, the compositions, systems, described herein can be used to treat diseases of the brain and CNS. Delivery options for the brain include encapsulation of CRISPR enzyme and guide RNA in the form of either DNA or RNA into liposomes and conjugating to molecular Trojan horses for trans-blood brain barrier (BBB) delivery. Molecular Trojan horses have been shown to be effective for delivery of B-gal expression vectors into the brain of non-human primates. The same approach can be used to delivery vectors containing CRISPR enzyme and guide RNA. For instance, Xia C F and Boado R J, Pardridge W M (“Antibody-mediated targeting of siRNA via the human insulin receptor using avidin-biotin technology.” Mol Pharm. 2009 May-June; 6(3):747-51. doi: 10.1021/mp800194) describes how delivery of short interfering RNA (siRNA) to cells in culture, and in vivo, is possible with combined use of a receptor-specific monoclonal antibody (mAb) and avidin-biotin technology. The authors also report that because the bond between the targeting mAb and the siRNA is stable with avidin-biotin technology, and RNAi effects at distant sites such as brain are observed in vivo following an intravenous administration of the targeted siRNA, the teachings of which can be adapted for use with the compositions, systems, herein. In other embodiments, an artificial virus can be generated for CNS and/or brain delivery. See e.g. Zhang et al. (Mol Ther. 2003 January; 7(1):11-8.)), the teachings of which can be adapted for use with the compositions, systems, herein.

### Treating Hearing Diseases

[0614] In some embodiments the composition, system, described herein can be used to treat a hearing disease or hearing loss in one or both ears. Deafness is often caused by lost or damaged hair cells that cannot relay signals to auditory neurons. In such cases, cochlear implants may be used to respond to sound and transmit electrical signals to the nerve cells. But these neurons often degenerate and retract from the cochlea as fewer growth factors are released by impaired hair cells.

[0615] In some embodiments, the composition, system, or modified cells can be delivered to one or both ears for treating or preventing hearing disease or loss by any suitable method or technique. Suitable methods and techniques include, but are not limited to those set forth in US patent application 20120328580 describes injection of a pharmaceutical composition into the ear (e.g., auricular administration), such as into the luminae of the cochlea (e.g., the Scala media, Sc vestibulae, and Sc tympani), e.g., using a syringe, e.g., a single-dose syringe. For example, one or more of the compounds described herein can be administered by intratympanic injection (e.g., into the middle ear), and/or injections into the outer, middle, and/or inner ear; administration in situ, via a catheter or pump (see e.g. McKenna et al., (U.S. Publication No. 2006/0030837) and Jacobsen et al., (U.S. Pat. No. 7,206,639); administration in combination with a mechanical device such as a cochlear implant or a hearing aid, which is worn in the outer ear (see e.g. U.S. Publication No. 2007/0093878, which provides an exemplary cochlear implant suitable for delivery of the compositions, systems, described herein to the ear). Such methods are routinely used in the art, for example, for the administration of steroids and antibiotics into human ears. Injection can be, for example, through the round window of the ear or through the cochlear capsule. Other inner ear administration methods are known in the art (see, e.g., Salt and Plontke, Drug Discovery Today, 10:1299-1306, 2005). In some embodiments, a catheter or pump can be positioned, e.g., in the ear (e.g., the outer, middle, and/or inner ear) of a patient during a surgical procedure. In some embodiments, a catheter or pump can be positioned, e.g., in the ear (e.g., the outer, middle, and/or inner ear) of a patient without the need for a surgical procedure.

[0616] In general, the cell therapy methods described in US patent application 20120328580 can be used to promote complete or partial differentiation of a cell to or towards a mature cell type of the inner ear (e.g., a hair cell) in vitro. Cells resulting from such methods can then be transplanted or implanted into a patient in need of such treatment. The cell culture methods required to practice these methods, including methods for identifying and selecting suitable cell types, methods for promoting complete or partial differentiation of selected cells, methods for identifying complete or partially differentiated cell types, and methods for implanting complete or partially differentiated cells are described below.

[0617] Cells suitable for use in the present invention include, but are not limited to, cells that are capable of differentiating completely or partially into a mature cell of the inner ear, e.g., a hair cell (e.g., an inner and/or outer hair cell), when contacted, e.g., in vitro, with one or more of the compounds described herein. Exemplary cells that are capable of differentiating into a hair cell include, but are not limited to stem cells (e.g., inner ear stem cells, adult stem cells, bone marrow derived stem cells, embryonic stem cells, mesenchymal stem cells, skin stem cells, iPS cells, and fat derived stem cells), progenitor cells (e.g., inner ear progenitor cells), support cells (e.g., Deiters' cells, pillar cells, inner phalangeal cells, tectal cells and Hensen's cells), and/or germ cells. The use of stem cells for the replacement of inner ear sensory cells is described in Li et al., (U.S. Publication No. 2005/0287127) and Li et al., (U.S. patent Ser. No. 11/953,797). The use of bone marrow derived stem cells for the replacement of inner ear sensory cells is described in Edge et al., PCT/US2007/084654. iPS cells are described, e.g., at Takahashi et al., Cell, Volume 131, Issue 5, Pages 861-872 (2007); Takahashi and Yamanaka, Cell 126, 663-76 (2006); Okita et al., Nature 448, 260-262 (2007); Yu, J. et al., Science 318(5858):1917-1920 (2007); Nakagawa et al., Nat. Biotechnol. 26:101-106 (2008); and Zaehres and Scholer, Cell 131(5):834-835 (2007). Such suitable cells can be identified by analyzing (e.g., qualitatively or quantitatively) the presence of one or more tissue specific genes. For example, gene expression can be detected by detecting the protein product of one or more tissue-specific genes. Protein detection techniques involve staining proteins (e.g., using cell extracts or whole cells) using antibodies against the appropriate antigen. In this case, the appropriate antigen is the protein product of the tissue-specific gene expression. Although, in principle, a first antibody (i.e., the antibody that binds the antigen) can be labeled, it is more common (and improves the visualization) to use a second antibody directed against the first (e.g., an anti-IgG). This second antibody is conjugated either with fluorochromes, or appropriate enzymes for colorimetric reactions, or gold beads (for electron microscopy), or with the biotin-avidin system, so that the location of the primary antibody, and thus the antigen, can be recognized.

[0618] The composition and system may be delivered to the ear by direct application of pharmaceutical composition to the outer ear, with compositions modified from US Published application, 20110142917. In some embodiments the pharmaceutical composition is applied to the ear canal. Delivery to the ear may also be referred to as aural or otic delivery.

[0619] In some embodiments, the compositions, systems, or components thereof and/or vectors or vector systems can be delivered to ear via a transfection to the inner ear through the intact round window by a novel proteidic delivery technology which may be applied to the nucleic acid-targeting system of the present invention (see, e.g., Qi et al., Gene Therapy (2013), 1-9). About 40 l of 10 mM RNA may be contemplated as the dosage for administration to the ear.

[0620] According to Rejali et al. (Hear Res. 2007 June; 228(1-2):180-7), cochlear implant function can be improved by good preservation of the spiral ganglion neurons, which are the target of electrical stimulation by the implant and brain derived neurotrophic factor (BDNF) has previously been shown to enhance spiral ganglion survival in experimentally deafened ears. Rejali et al. tested a modified design of the cochlear implant electrode that includes a coating of fibroblast cells transduced by a viral vector with a BDNF gene insert. To accomplish this type of ex vivo gene transfer, Rejali et al. transduced guinea pig fibroblasts with an adenovirus with a BDNF gene cassette insert, and determined that these cells secreted BDNF and then attached BDNF-secreting cells to the cochlear implant electrode via an agarose gel, and implanted the electrode in the scala tympani. Rejali et al. determined that the BDNF expressing electrodes were able to preserve significantly more spiral ganglion neurons in the basal turns of the cochlea after 48 days of implantation when compared to control electrodes and demonstrated the feasibility of combining cochlear implant therapy with ex vivo gene transfer for enhancing spiral ganglion neuron survival. Such a system may be applied to the nucleic acid-targeting system of the present invention for delivery to the ear.

[0621] In some embodiments, the system set forth in Mukherjea et al. (Antioxidants & Redox Signaling, Volume 13, Number 5, 2010) can be adapted for transtympanic administration of the composition, system, or component thereof to the ear. In some embodiments, a dosage of about 2 mg to about 4 mg of CRISPR Cas for administration to a human.

[0622] In some embodiments, the system set forth in [Jung et al. (Molecular Therapy, vol. 21 no. 4, 834-841 April 2013) can be adapted for vestibular epithelial delivery of the composition, system, or component thereof to the ear. In some embodiments, a dosage of about 1 to about 30 mg of CRISPR Cas for administration to a human.

### Treating Diseases in Non-Dividing Cells

[0623] In some embodiments, the gene or transcript to be corrected is in a non-dividing cell. Exemplary non-dividing cells are muscle cells or neurons. Non-dividing (especially non-dividing, fully differentiated) cell types present issues for gene targeting or genome engineering, for example because homologous recombination (HR) is generally suppressed in the G1 cell-cycle phase. However, while studying the mechanisms by which cells control normal DNA repair systems, Durocher discovered a previously unknown switch that keeps HR “off” in non-dividing cells and devised a strategy to toggle this switch back on. Orthwein et al. (Daniel Durocher's lab at the Mount Sinai Hospital in Ottawa, Canada) recently reported (Nature 16142, published online 9 Dec. 2015) have shown that the suppression of HR can be lifted and gene targeting successfully concluded in both kidney (293T) and osteosarcoma (U2OS) cells. Tumor suppressors, BRCA1, PALB2 and BRAC2 are known to promote DNA DSB repair by HR. They found that formation of a complex of BRCA1 with PALB2-BRAC2 is governed by a ubiquitin site on PALB2, such that action on the site by an E3 ubiquitin ligase. This E3 ubiquitin ligase is composed of KEAP1 (a PALB2-interacting protein) in complex with cullin-3 (CUL3)-RBX1. PALB2 ubiquitylation suppresses its interaction with BRCA1 and is counteracted by the deubiquitylase USP11, which is itself under cell cycle control. Restoration of the BRCA1-PALB2 interaction combined with the activation of DNA-end resection is sufficient to induce homologous recombination in G1, as measured by a number of methods including a CRISPR-Cas9-based gene-targeting assay directed at USP11 or KEAP1 (expressed from a pX459 vector). However, when the BRCA1-PALB2 interaction was restored in resection-competent G1 cells using either KEAP1 depletion or expression of the PALB2-KR mutant, a robust increase in gene-targeting events was detected. These teachings can be adapted for and/or applied to the Cas compositions, systems, described herein.

[0624] Thus, reactivation of HR in cells, especially non-dividing, fully differentiated cell types is preferred, in some embodiments. In some embodiments, promotion of the BRCA1-PALB2 interaction is preferred in some embodiments. In some embodiments, the target ell is a non-dividing cell. In some embodiments, the target cell is a neuron or muscle cell. In some embodiments, the target cell is targeted in vivo. In some embodiments, the cell is in G1 and HR is suppressed. In some embodiments, use of KEAP1 depletion, for example inhibition of expression of KEAP1 activity, is preferred. KEAP1 depletion may be achieved through siRNA, for example as shown in Orthwein et al. Alternatively, expression of the PALB2-KR mutant (lacking all eight Lys residues in the BRCA1-interaction domain is preferred, either in combination with KEAP1 depletion or alone. PALB2-KR interacts with BRCA1 irrespective of cell cycle position. Thus, promotion or restoration of the BRCA1-PALB2 interaction, especially in G1 cells, is preferred in some embodiments, especially where the target cells are non-dividing, or where removal and return (ex vivo gene targeting) is problematic, for example neuron or muscle cells. KEAP1 siRNA is available from ThermoFischer. In some embodiments, a BRCA1-PALB2 complex may be delivered to the G1 cell. In some embodiments, PALB2 deubiquitylation may be promoted for example by increased expression of the deubiquitylase USP11, so it is envisaged that a construct may be provided to promote or up-regulate expression or activity of the deubiquitylase USP11.

### Treating Diseases of the Eye

[0625] In some embodiments, the disease to be treated is a disease that affects the eyes. Thus, in some embodiments, the composition, system, or component thereof described herein is delivered to one or both eyes.

[0626] The composition, system, can be used to correct ocular defects that arise from several genetic mutations further described in Genetic Diseases of the Eye, Second Edition, edited by Elias I. Traboulsi, Oxford University Press, 2012.

[0627] In some embodiments, the condition to be treated or targeted is an eye disorder. In some embodiments, the eye disorder may include glaucoma. In some embodiments, the eye disorder includes a retinal degenerative disease. In some embodiments, the retinal degenerative disease is selected from Stargardt disease, Bardet-Biedl Syndrome, Best disease, Blue Cone Monochromacy, Choroidermia, Cone-rod dystrophy, Congenital Stationary Night Blindness, Enhanced S-Cone Syndrome, Juvenile X-Linked Retinoschisis, Leber Congenital Amaurosis, Malattia Leventinesse, Norrie Disease or X-linked Familial Exudative Vitreoretinopathy, Pattern Dystrophy, Sorsby Dystrophy, Usher Syndrome, Retinitis Pigmentosa, Achromatopsia or Macular dystrophies or degeneration, Retinitis Pigmentosa, Achromatopsia, and age related macular degeneration. In some embodiments, the retinal degenerative disease is Leber Congenital Amaurosis (LCA) or Retinitis Pigmentosa. Other exemplary eye diseases are described in greater detail elsewhere herein.

[0628] In some embodiments, the composition, system, is delivered to the eye, optionally via intravitreal injection or subretinal injection. Intraocular injections may be performed with the aid of an operating microscope. For subretinal and intravitreal injections, eyes may be prolapsed by gentle digital pressure and fundi visualized using a contact lens system consisting of a drop of a coupling medium solution on the cornea covered with a glass microscope slide coverslip. For subretinal injections, the tip of a 10-mm 34-gauge needle, mounted on a 5-μl Hamilton syringe may be advanced under direct visualization through the superior equatorial sclera tangentially towards the posterior pole until the aperture of the needle was visible in the subretinal space. Then, 2 μl of vector suspension may be injected to produce a superior bullous retinal detachment, thus confirming subretinal vector administration. This approach creates a self-sealing sclerotomy allowing the vector suspension to be retained in the subretinal space until it is absorbed by the RPE, usually within 48 h of the procedure. This procedure may be repeated in the inferior hemisphere to produce an inferior retinal detachment. This technique results in the exposure of approximately 70% of neurosensory retina and RPE to the vector suspension. For intravitreal injections, the needle tip may be advanced through the sclera 1 mm posterior to the corneoscleral limbus and 2 μl of vector suspension injected into the vitreous cavity. For intracameral injections, the needle tip may be advanced through a corneoscleral limbal paracentesis, directed towards the central cornea, and 2 μl of vector suspension may be injected. For intracameral injections, the needle tip may be advanced through a corneoscleral limbal paracentesis, directed towards the central cornea, and 2 μl of vector suspension may be injected. These vectors may be injected at titers of either 1.0-1.4×10¹⁰ or 1.0-1.4×10⁹ transducing units (TU)/ml.

[0629] In some embodiments, for administration to the eye, lentiviral vectors. In some embodiments, the lentiviral vector is an equine infectious anemia virus (EIAV) vector. Exemplary EIAV vectors for eye delivery are described in Balagaan, J Gene Med 2006; 8: 275-285, Published online 21 Nov. 2005 in Wiley InterScience (www.interscience.wiley.com). DOI: 10.1002/jgm.845; Binley et al., HUMAN GENE THERAPY 23:980-991 (September 2012), which can be adapted for use with the composition, system, described herein. In some embodiments, the dosage can be 1.1×10⁵ transducing units per eye (TU/eye) in a total volume of 100 l.

[0630] Other viral vectors can also be used for delivery to the eye, such as AAV vectors, such as those described in Campochiaro et al., Human Gene Therapy 17:167-176 (February 2006), Millington-Ward et al. (Molecular Therapy, vol. 19 no. 4, 642-649 April 2011; Dalkara et al. (Sci Transl Med 5, 189ra76 (2013)), which can be adapted for use with the composition, system, described herein. In some embodiments, the dose can range from about 10⁶ to 10^{9.5} particle units. In the context of the Millington-Ward AAV vectors, a dose of about 2×10¹¹ to about 6×10¹³ virus particles can be administered. In the context of Dalkara vectors, a dose of about 1×10¹⁵ to about 1×10¹⁶ vg/ml administered to a human.

[0631] In some embodiments, the sd-rxRNA® system of R×i Pharmaceuticals may be used/and or adapted for delivering composition, system, to the eye. In this system, a single intravitreal administration of 3 μg of sd-rxRNA results in sequence-specific reduction of PPIB mRNA levels for 14 days. The sd-rxRNA® system may be applied to the nucleic acid-targeting system of the present invention, contemplating a dose of about 3 to 20 mg of CRISPR administered to a human.

[0632] In other embodiments, the methods of US Patent Publication No. 20130183282, which is directed to methods of cleaving a target sequence from the human rhodopsin gene, may also be modified to the nucleic acid-targeting system of the present invention.

[0633] In other embodiments, the methods of US Patent Publication No. 20130202678 for treating retinopathies and sight-threatening ophthalmologic disorders relating to delivering of the Puf-A gene (which is expressed in retinal ganglion and pigmented cells of eye tissues and displays a unique anti-apoptotic activity) to the sub-retinal or intravitreal space in the eye. In particular, desirable targets are zgc:193933, prdmla, spata2, tex10, rbb4, ddx3, zp2.2, Blimp-1 and HtrA2, all of which may be targeted by the composition, system, of the present invention.

[0634] Wu (Cell Stem Cell,13:659-62, 2013) designed a guide RNA that led Cas9 to a single base pair mutation that causes cataracts in mice, where it induced DNA cleavage. Then using either the other wild-type allele or oligos given to the zygotes repair mechanisms corrected the sequence of the broken allele and corrected the cataract-causing genetic defect in mutant mouse. This approach can be adapted to and/or applied to the compositions, systems, described herein.

[0635] US Patent Publication No. 20120159653, describes use of zinc finger nucleases to genetically modify cells, animals and proteins associated with macular degeneration (MD), the teachings of which can be applied to and/or adapted for the compositions, systems, described herein.

[0636] One aspect of US Patent Publication No. 20120159653 relates to editing of any chromosomal sequences that encode proteins associated with MD which may be applied to the nucleic acid-targeting system of the present invention.

### Treating Muscle Diseases and Cardiovascular Diseases

[0637] In some embodiments, the composition, system, can be used to treat and/or prevent a muscle disease and associated circulatory or cardiovascular disease or disorder. The present invention also contemplates delivering the composition, system, described herein, e.g. Cas effector protein systems, to the heart. For the heart, a myocardium tropic adeno-associated virus (AAVM) is preferred, in particular AAVM41 which showed preferential gene transfer in the heart (see, e.g., Lin-Yanga et al., PNAS, Mar. 10, 2009, vol. 106, no. 10). Administration may be systemic or local. A dosage of about 1-10×10¹⁴ vector genomes are contemplated for systemic administration. See also, e.g., Eulalio et al. (2012) Nature 492: 376 and Somasuntharam et al. (2013) Biomaterials 34: 7790, the teachings of which can be adapted for and/or applied to the compositions, systems, described herein.

[0638] For example, US Patent Publication No. 20110023139, the teachings of which can be adapted for and/or applied to the compositions, systems, described herein describes use of zinc finger nucleases to genetically modify cells, animals and proteins associated with cardiovascular disease. Cardiovascular diseases generally include high blood pressure, heart attacks, heart failure, and stroke and TIA. Any chromosomal sequence involved in cardiovascular disease or the protein encoded by any chromosomal sequence involved in cardiovascular disease may be utilized in the methods described in this disclosure. The cardiovascular-related proteins are typically selected based on an experimental association of the cardiovascular-related protein to the development of cardiovascular disease. For example, the production rate or circulating concentration of a cardiovascular-related protein may be elevated or depressed in a population having a cardiovascular disorder relative to a population lacking the cardiovascular disorder. Differences in protein levels may be assessed using proteomic techniques including but not limited to Western blot, immunohistochemical staining, enzyme linked immunosorbent assay (ELISA), and mass spectrometry. Alternatively, the cardiovascular-related proteins may be identified by obtaining gene expression profiles of the genes encoding the proteins using genomic techniques including but not limited to DNA microarray analysis, serial analysis of gene expression (SAGE), and quantitative real-time polymerase chain reaction (Q-PCR). Exemplary chromosomal sequences can be found in Table 3.

[0639] The compositions, systems, herein can be used for treating diseases of the muscular system. The present invention also contemplates delivering the composition, system, described herein, e.g. Cas (e.g. Cas9 and/or Cas12) effector protein systems, to muscle(s).

[0640] In some embodiments, the muscle disease to be treated is a muscle dystrophy such as DMD. In some embodiments, the composition, system, such as a system capable of RNA modification, described herein can be used to achieve exon skipping to achieve correction of the diseased gene. As used herein, the term “exon skipping” refers to the modification of pre-mRNA splicing by the targeting of splice donor and/or acceptor sites within a pre-mRNA with one or more complementary antisense oligonucleotide(s) (AONs). By blocking access of a spliceosome to one or more splice donor or acceptor site, an AON may prevent a splicing reaction thereby causing the deletion of one or more exons from a fully-processed mRNA. Exon skipping may be achieved in the nucleus during the maturation process of pre-mRNAs. In some examples, exon skipping may include the masking of key sequences involved in the splicing of targeted exons by using a composition, system, described herein capable of RNA modification. In some embodiments, exon skipping can be achieved in dystrophin mRNA. In some embodiments, the composition, system, can induce exon skipping at exon 1, 2, 3, 4, 5, 6, 7, 8, 10, 11, 12, 13, 14, 15, 16, 17, 18, 19, 20, 21, 22, 23, 24, 25, 26, 27, 28, 29, 30, 31, 32, 33, 34, 45, 36, 37, 38, 39, 40, 41, 42, 43, 44, 45, 46, 47, 48, 49, 50, 51, 52, 53, 54, 55, 56, 57, 58, 59, 60, 61, 62, 63, 64, 65, 66, 67, 68, 69, 70, 71, 72, 73, 74, 75, 76, 77, 78, 79, or any combination thereof of the dystrophin mRNA. In some embodiments, the composition, system, can induce exon skipping at exon 43, 44, 50, 51, 52, 55, or any combination thereof of the dystrophin mRNA. Mutations in these exons, can also be corrected using non-exon skipping polynucleotide modification methods.

[0641] In some embodiments, for treatment of a muscle disease, the method of Bortolanza et al. Molecular Therapy vol. 19 no. 11, 2055-264 November 2011) may be applied to an AAV expressing CRISPR Cas and injected into humans at a dosage of about 2×10¹⁵ or 2×10¹⁶ vg of vector. The teachings of Bortolanza et al., can be adapted for and/or applied to the compositions, systems, described herein.

[0642] In some embodiments, the method of Dumonceaux et al. (Molecular Therapy vol. 18 no. 5, 881-887 May 2010) may be applied to an AAV expressing CRISPR Cas and injected into humans, for example, at a dosage of about 10¹⁴ to about 10¹⁵ vg of vector. The teachings of Dumonceaux described herein can be adapted for and/or applied to the compositions, systems, described herein.

[0643] In some embodiments, the method of Kinouchi et al. (Gene Therapy (2008) 15, 1126-1130) may be applied to CRISPR Cas systems described herein and injected into a human, for example, at a dosage of about 500 to 1000 ml of a 40 μM solution into the muscle.

[0644] In some embodiments, the method of Hagstrom et al. (Molecular Therapy Vol. 10, No. 2, August 2004) can be adapted for and/or applied to the compositions, systems, herein and injected at a dose of about 15 to about 50 mg into the great saphenous vein of a human.

### Treating Diseases of the Liver and Kidney

[0645] In some embodiments, the composition, system, or component thereof described herein can be used to treat a disease of the kidney or liver. Thus, in some embodiments, delivery of the CRISRP-Cas system or component thereof described herein is to the liver or kidney.

[0646] Delivery strategies to induce cellular uptake of the therapeutic nucleic acid include physical force or vector systems such as viral-, lipid- or complex-based delivery, or nanocarriers. From the initial applications with less possible clinical relevance, when nucleic acids were addressed to renal cells with hydrodynamic high-pressure injection systemically, a wide range of gene therapeutic viral and non-viral carriers have been applied already to target posttranscriptional events in different animal kidney disease models in vivo (Csaba Revesz and Peter Hamar (2011). Delivery Methods to Target RNAs in the Kidney, Gene Therapy Applications, Prof Chunsheng Kang (Ed.), ISBN: 978-953-307-541-9, InTech, Available from: www.intechopen.com/books/gene-therapy-applications/delivery-methods-to-target-rnas-inthe-kidney). Delivery methods to the kidney may include those in Yuan et al. (Am J Physiol Renal Physiol 295: F605-F617, 2008). The method of Yuang et al. may be applied to the CRISPR Cas system of the present invention contemplating a 1-2 g subcutaneous injection of CRISPR Cas conjugated with cholesterol to a human for delivery to the kidneys. In some embodiments, the method of Molitoris et al. (J Am Soc Nephrol 20: 1754-1764, 2009) can be adapted to the CRISRP-Cas system of the present invention and a cumulative dose of 12-20 mg/kg to a human can be used for delivery to the proximal tubule cells of the kidneys. In some embodiments, the methods of Thompson et al. (Nucleic Acid Therapeutics, Volume 22, Number 4, 2012) can be adapted to the CRISRP-Cas system of the present invention and a dose of up to 25 mg/kg can be delivered via i.v. administration. In some embodiments, the method of Shimizu et al. (J Am Soc Nephrol 21: 622-633, 2010) can be adapted to the CRISRP-Cas system of the present invention and a dose of about of 10-20 μmol CRISPR Cas complexed with nanocarriers in about 1-2 liters of a physiologic fluid for i.p. administration can be used.

[0647] Other various delivery vehicles can be used to deliver the composition, system, to the kidney such as viral, hydrodynamic, lipid, polymer nanoparticles, aptamers and various combinations thereof (see e.g. Larson et al., Surgery, (August 2007), Vol. 142, No. 2, pp. (262-269); Hamar et al., Proc Natl Acad Sci, (October 2004), Vol. 101, No. 41, pp. (14883-14888); Zheng et al., Am J Pathol, (October 2008), Vol. 173, No. 4, pp. (973-980); Feng et al., Transplantation, (May 2009), Vol. 87, No. 9, pp. (1283-1289); Q. Zhang et al., PloS ONE, (July 2010), Vol. 5, No. 7, e11709, pp. (1-13); Kushibikia et al., J Controlled Release, (July 2005), Vol. 105, No. 3, pp. (318-331); Wang et al., Gene Therapy, (July 2006), Vol. 13, No. 14, pp. (1097-1103); Kobayashi et al., Journal of Pharmacology and Experimental Therapeutics, (February 2004), Vol. 308, No. 2, pp. (688-693); Wolfrum et al., Nature Biotechnology, (September 2007), Vol. 25, No. 10, pp. (1149-1157); Molitoris et al., J Am Soc Nephrol, (August 2009), Vol. 20, No. 8 pp. (1754-1764); Mikhaylova et al., Cancer Gene Therapy, (March 2011), Vol. 16, No. 3, pp. (217-226); Y. Zhang et al., J Am Soc Nephrol, (April 2006), Vol. 17, No. 4, pp. (1090-1101); Singhal et al., Cancer Res, (May 2009), Vol. 69, No. 10, pp. (4244-4251); Malek et al., Toxicology and Applied Pharmacology, (April 2009), Vol. 236, No. 1, pp. (97-108); Shimizu et al., J Am Soc Nephrology, (April 2010), Vol. 21, No. 4, pp. (622-633); Jiang et al., Molecular Pharmaceutics, (May-June 2009), Vol. 6, No. 3, pp. (727-737); Cao et al, J Controlled Release, (June 2010), Vol. 144, No. 2, pp. (203-212); Ninichuk et al., Am J Pathol, (March 2008), Vol. 172, No. 3, pp. (628-637); Purschke et al., Proc Natl Acad Sci, (March 2006), Vol. 103, No. 13, pp. (5173-5178).

[0648] In some embodiments, delivery is to liver cells. In some embodiments, the liver cell is a hepatocyte. Delivery of the composition and system herein may be via viral vectors, especially AAV (and in particular AAV2/6) vectors. These can be administered by intravenous injection. A preferred target for the liver, whether in vitro or in vivo, is the albumin gene. This is a so-called ‘safe harbor” as albumin is expressed at very high levels and so some reduction in the production of albumin following successful gene editing is tolerated. It is also preferred as the high levels of expression seen from the albumin promoter/enhancer allows for useful levels of correct or transgene production (from the inserted donor template) to be achieved even if only a small fraction of hepatocytes are edited. See sites identified by Wechsler et al. (reported at the 57th Annual Meeting and Exposition of the American Society of Hematology—abstract available online at https.//ash.confex.com/ash/2015/webprogram/Paper86495.html and presented on 6th December 2015) which can be adapted for use with the compositions, systems, herein.

[0649] Exemplary liver and kidney diseases that can be treated and/or prevented are described elsewhere herein.

### Treating Epithelial and Lung Diseases

[0650] In some embodiments, the disease treated or prevented by the composition, system, described herein can be a lung or epithelial disease. The compositions, systems, described herein can be used for treating epithelial and/or lung diseases. The present invention also contemplates delivering the composition, system, described herein, to one or both lungs.

[0651] In some embodiments, as viral vector can be used to deliver the composition, system, or component thereof to the lungs. In some embodiments, the AAV is an AAV-1, AAV-2, AAV-5, AAV-6, and/or AAV-9 for delivery to the lungs. (see, e.g., Li et al., Molecular Therapy, vol. 17 no. 12, 2067-277 December 2009). In some embodiments, the MOI can vary from 1×10³ to 4×10⁵ vector genomes/cell. In some embodiments, the delivery vector can be an RSV vector as in Zamora et al. (Am J Respir Crit Care Med Vol 183. pp 531-538, 2011. The method of Zamora et al. may be applied to the nucleic acid-targeting system of the present invention and an aerosolized CRISPR Cas, for example with a dosage of 0.6 mg/kg, may be contemplated for the present invention.

[0652] Subjects treated for a lung disease may for example receive pharmaceutically effective amount of aerosolized AAV vector system per lung endobronchially delivered while spontaneously breathing. As such, aerosolized delivery is preferred for AAV delivery in general. An adenovirus or an AAV particle may be used for delivery. Suitable gene constructs, each operably linked to one or more regulatory sequences, may be cloned into the delivery vector. In this instance, the following constructs are provided as examples: Cbh or EF1a promoter for Cas (Cas (e.g. Cas9 and/or Cas12)), U6 or H1 promoter for guide RNA): A preferred arrangement is to use a CFTRdelta508 targeting guide, a repair template for deltaF508 mutation and a codon optimized Cas (e.g. Cas9 and/or Cas12) enzyme, with optionally one or more nuclear localization signal or sequence(s) (NLS(s)), e.g., two (2) NLSs.

### Treating Diseases of the Skin

[0653] The compositions, systems, described herein can be used for the treatment of skin diseases. The present invention also contemplates delivering the composition, system, described herein, to the skin.

[0654] In some embodiments, delivery to the skin (intradermal delivery) of the composition, system, or component thereof can be via one or more microneedles or microneedle containing device. For example, in some embodiments the device and methods of Hickerson et al. (Molecular Therapy—Nucleic Acids (2013) 2, e129) can be used and/or adapted to deliver the composition, system, described herein, for example, at a dosage of up to 300 μl of 0.1 mg/ml CRISPR-Cas (e.g. Cas9 and/or Cas12) system to the skin.

[0655] In some embodiments, the methods and techniques of Leachman et al. (Molecular Therapy, vol. 18 no. 2, 442-446 February 2010) can be used and/or adapted for delivery of a CIRPSR-Cas system described herein to the skin.

[0656] In some embodiments, the methods and techniques of [1785] Zheng et al. (PNAS, Jul. 24, 2012, vol. 109, no. 30, 11975-11980) can be used and/or adapted for nanoparticle delivery of a CIRPSR-Cas system described herein to the skin. In some embodiments, as dosage of about 25 nM applied in a single application can achieve gene knockdown in the skin.

### Treating Cancer

[0657] The compositions, systems, described herein can be used for the treatment of cancer. The present invention also contemplates delivering the composition, system, described herein, to a cancer cell. Also, as is described elsewhere herein the compositions, systems, can be used to modify an immune cell, such as a CAR or CAR T cell, which can then in turn be used to treat and/or prevent cancer. This is also described in WO2015161276, the disclosure of which is hereby incorporated by reference and described herein below.

[0658] Target genes suitable for the treatment or prophylaxis of cancer can include those set forth in Tables 4 and 5. In some embodiments, target genes for cancer treatment and prevention can also include those described in WO2015048577 the disclosure of which is hereby incorporated by reference and can be adapted for and/or applied to the composition, system, described herein.

### Diseases

Genetic Diseases and Diseases with a Genetic and/or Epigenetic Aspect

[0659] The compositions, systems, or components thereof can be used to treat and/or prevent a genetic disease or a disease with a genetic and/or epigenetic aspect. The genes and conditions exemplified herein are not exhaustive. In some embodiments, a method of treating and/or preventing a genetic disease can include administering a composition, system, and/or one or more components thereof to a subject, where the composition, system, and/or one or more components thereof is capable of modifying one or more copies of one or more genes associated with the genetic disease or a disease with a genetic and/or epigenetic aspect in one or more cells of the subject. In some embodiments, modifying one or more copies of one or more genes associated with a genetic disease or a disease with a genetic and/or epigenetic aspect in the subject can eliminate a genetic disease or a symptom thereof in the subject. In some embodiments, modifying one or more copies of one or more genes associated with a genetic disease or a disease with a genetic and/or epigenetic aspect in the subject can decrease the severity of a genetic disease or a symptom thereof in the subject. In some embodiments, the compositions, systems, or components thereof can modify one or more genes or polynucleotides associated with one or more diseases, including genetic diseases and/or those having a genetic aspect and/or epigenetic aspect, including but not limited to, any one or more set forth in Table 4. It will be appreciated that those diseases and associated genes listed herein are non-exhaustive and non-limiting. Further some genes play roles in the development of multiple diseases.

TABLE 4
Exemplary Genetic and Other Diseases and Associated Genes

| | Primary | Additional | |
|---|---|---|---|
| | Tissues or System | Tissues/Systems | |
| Disease Name | Affected | Affected | Genes |
| Achondroplasia | Bone and | | fibroblast growth factor receptor 3 |
| | Muscle | | (FGFR3) |
| Achromatopsia | eye | | CNGA3, CNGB3, GNAT2, PDE6C, |
| | | | PDE6H, ACHM2, ACHM3, |
| Acute Renal Injury | kidney | | NFkappaB, AATF, p85alpha, FAS, |
| | | | Apoptosis cascade elements (e.g. |
| | | | FASR, Caspase 2, 3, 4, 6, 7, 8, 9, 10, |
| | | | AKT, TNF alpha, IGF1, IGF1R, |
| | | | RIPK1), p53 |
| Age Related Macular | eye | | Abcr; CCL2; CC2; CP |
| Degeneration | | | (ceruloplasmin); Timp3; cathepsinD; |
| | | | VLDLR, CCR2 |
| AIDS | Immune System | | KIR3DL1, NKAT3, NKB1, AMB11, |
| | | | KIR3DS1, IFNG, CXCL12, SDF1 |
| Albinism (including | Skin, hair, eyes, | | TYR, OCA2, TYRP1, and SLC45A2, |
| oculocutaneous albinism (types | | | SLC24A5 and C10orf11 |
| 1-7) and ocular albinism) | | | |
| Alkaptonuria | Metabolism of | Tissues/organs | HGD |
| | amino acids | where | |
| | | homogentisic | |
| | | acid | |
| | | accumulates, | |
| | | particularly | |
| | | cartilage (joints), | |
| | | heart valves, | |
| | | kidneys | |
| alpha-1 antitrypsin deficiency | Lung | Liver, skin, | SERPINA1, those set forth in |
| (AATD or A1AD) | | vascular system, | WO2017165862, PiZ allele |
| | | kidneys, GI | |
| ALS | CNS | | SOD1; ALS2; ALS3; ALS5; |
| | | | ALS7; STEX; FUS; TARDBP; VEGF |
| | | | (VEGF-a; |
| | | | VEGF-b; VEGF-c); DPP6; NEFH, |
| | | | PTGS1, SLC1A2, TNFRSF10B, |
| | | | PRPH, HSP90AA1, CRIA2, IFNG, |
| | | | AMPA2 S100B, FGF2, AOX1, CS, |
| | | | TXN, RAPHJ1, MAP3K5, NBEAL1, |
| | | | GPX1, ICA1L, RAC1, MAPT, ITPR2, |
| | | | ALS2CR4, GLS, ALS2CR8, CNTFR, |
| | | | ALS2CR11, FOLH1, FAM117B, |
| | | | P4HB, CNTF, SQSTM1, STRADB, |
| | | | NAIP, NLR, YWHAQ, SLC33A1, |
| | | | TRAK2, SCA1, NIF3L1, NIF3, |
| | | | PARD3B, COX8A, CDK15, HECW1, |
| | | | HECT, C2, WW 15, NOS1, MET, |
| | | | SOD2, HSPB1, NEFL, CTSB, ANG, |
| | | | HSPA8, RNase A, VAPB, VAMP, |
| | | | SNCA, alpha HGF, CAT, ACTB, |
| | | | NEFM, TH, BCL2, FAS, CASP3, |
| | | | CLU, SMN1, G6PD, BAX, HSF1, |
| | | | RNF19A, JUN, ALS2CR12, HSPA5, |
| | | | MAPK14, APEX1, TXNRD1, NOS2, |
| | | | TIMP1, CASP9, XIAP, GLG1, EPO, |
| | | | VEGFA, ELN, GDNF, NFE2L2, |
| | | | SLC6A3, HSPA4, APOE, PSMB8, |
| | | | DCTN2, TIMP3, KIFAP3, SLC1A1, |
| | | | SMN2, CCNC, STUB1, ALS2, |
| | | | PRDX6, SYP, CABIN1, CASP1, |
| | | | GART, CDK5, ATXN3, RTN4, |
| | | | C1QB, VEGFC, HTT, PARK7, XDH, |
| | | | GFAP, MAP2, CYCS, FCGR3B, CCS, |
| | | | UBL5, MMP9m SLC18A3, TRPM7, |
| | | | HSPB2, AKT1, DEERL1, CCL2, |
| | | | NGRN, GSR, TPPP3, APAF1, |
| | | | BTBD10, GLUD1, CXCR4, S:C1A3, |
| | | | FLT1, PON1, AR, LIF, ERBB3, :GA:S1, |
| | | | CD44, TP53, TLR3, GRIA1, |
| | | | GAPDH, AMPA, GRIK1, DES, |
| | | | CHAT, FLT4, CHMP2B, BAG1, |
| | | | CHRNA4, GSS, BAK1, KDR, GSTP1, |
| | | | OGG1, IL6 |
| Alzheimer's Disease | Brain | | E1; CHIP; UCH; UBB; Tau; LRP; |
| | | | PICALM; CLU; PS1; |
| | | | SORL1; CR1; VLDLR; UBA1; |
| | | | UBA3; CHIP28; AQP1; UCHL1; |
| | | | UCHL3; APP, AAA, CVAP, AD1, |
| | | | APOE, AD2, DCP1, ACE1, MPO, |
| | | | PACIP1, PAXIP1L, PTIP, A2M, |
| | | | BLMH, BMH, PSEN1, AD3, ALAS2, |
| | | | ABCA1, BIN1, BDNF, BTNL8, |
| | | | C1ORF49, CDH4, CHRNB2, |
| | | | CKLFSF2, CLEC4E, CR1L, CSF3R, |
| | | | CST3, CYP2C, DAPK1, ESR1, |
| | | | FCAR, FCGR3B, FFA2, FGA, GAB2, |
| | | | GALP, GAPDHS, GMPB, HP, HTR7, |
| | | | IDE, IF127, IFI6, IFIT2, IL1RN, IL- |
| | | | 1RA, IL8RA, IL8RB, JAG1, KCNJ15, |
| | | | LRP6, MAPT, MARK4, MPHOSPH1, |
| | | | MTHFR, NBN, NCSTN, NIACR2, |
| | | | NMNAT3, NTM, ORM1, P2RY13, |
| | | | PBEF1, PCK1, PICALM, PLAU, |
| | | | PLXNC1, PRNP, PSEN1, PSEN2, |
| | | | PTPRA, RALGPS2, RGSL2, |
| | | | SELENBP1, SLC25A37, SORL1, |
| | | | Mitoferrin-1, TF, TFAM, TNF, |
| | | | TNFRSF10C, UBE1C |
| Amyloidosis | | | APOA1, APP, AAA, CVAP, AD1, |
| | | | GSN, FGA, LYZ, TTR, PALB |
| Amyloid neuropathy | | | TTR, PALB |
| Anemia | Blood | | CDAN1, CDA1, RPS19, DBA, PKLR, |
| | | | PK1, NT5C3, UMPH1, PSN1, RHAG, |
| | | | RH50A, NRAMP2, SPTB, ALAS2, |
| | | | ANH1, ASB, ABCB7, ABC7, ASAT |
| Angelman Syndrome | Nervous system, | | UBE3A |
| | brain | | |
| Attention Deficit Hyperactivity | Brain | | PTCHD1 |
| Disorder (ADHD) | | | |
| Autoimmune lymphoproliferative | Immune system | | TNFRSF6, APT1, FAS, CD95, |
| syndrome | | | ALPS1A |
| Autism, Autism spectrum | Brain | | PTCHD1; Mecp2; BZRAP1; MDGA2; |
| disorders (ASDs), including | | | Sema5A; Neurexin 1; GLO1, RTT, |
| Asperger's and a general | | | PPMX, MRX16, RX79, NLGN3, |
| diagnostic category called | | | NLGN4, KIAA1260, AUTSX2, |
| Pervasive Developmental | | | FMR1, FMR2; FXR1; FXR2; |
| Disorders (PDDs) | | | MGLUR5, ATP10C, CDH10, GRM6, |
| | | | MGLUR6, CDH9, CNTN4, NLGN2, |
| | | | CNTNAP2, SEMA5A, DHCR7, |
| | | | NLGN4X, NLGN4Y, DPP6, NLGN5, |
| | | | EN2, NRCAM, MDGA2, NRXN1, |
| | | | FMR2, AFF2, FOXP2, OR4M2, |
| | | | OXTR, FXR1, FXR2, PAH, |
| | | | GABRA1, PTEN, GABRA5, PTPRZ1, |
| | | | GABRB3, GABRG1, HIRIP3, |
| | | | SEZ6L2, HOXA1, SHANK3, IL6, |
| | | | SHBZRAP1, LAMB1, SLC6A4, |
| | | | SERT, MAPK3, TAS2R1, MAZ, |
| | | | TSC1, MDGA2, TSC2, MECP2, |
| | | | UBE3A, WNT2, see also |
| | | | 20110023145 |
| autosomal dominant polycystic | kidney | liver | PKD1, PKD2 |
| kidney disease (ADPKD) - | | | |
| (includes diseases such as von | | | |
| Hippel-Lindau disease and | | | |
| tubreous sclerosis complex | | | |
| disease) | | | |
| Autosomal Recessive Polycystic | kidney | liver | PKDH1 |
| Kidney Disease (ARPKD) | | | |
| Ataxia-Telangiectasia (a.k.a | Nervous system, | various | ATM |
| Louis Bar syndrome) | immune system | | |
| B-Cell Non-Hodgkin Lymphoma | | | BCL7A, BCL7 |
| Bardet-Biedl syndrome | Eye, | Liver, ear, | ARL6, BBS1, BBS2, BBS4, BBS5, |
| | musculoskeletal | gastrointestinal | BBS7, BBS9, BBS10, BBS12, |
| | system, kidney, | system, brain | CEP290, INPP5E, LZTFL1, MKKS, |
| | reproductive | | MKS1, SDCCAG8, TRIM32, TTC8 |
| | organs | | |
| Bare Lymphocyte Syndrome | blood | | TAPBP, TPSN, TAP2, ABCB3, PSF2, |
| | | | RING11, MHC2TA, C2TA, RFX5, |
| | | | RFXAP, RFX5 |
| Bartter's Syndrome (types I, II, | kidney | | SLC12A1 (type I), KCNJ1 (type II), |
| III, IVA and B, and V) | | | CLCNKB (type III), BSND (type IV |
| | | | A), or both the CLCNKA CLCNKB |
| | | | genes (type IV B), CASR (type V). |
| Becker muscular dystrophy | Muscle | | DMD, BMD, MYF6 |
| Best Disease (Vitelliform | eye | | VMD2 |
| Macular Dystrophy type 2) | | | |
| Bleeding Disorders | blood | | TBXA2R, P2RX1, P2X1 |
| Blue Cone Monochromacy | eye | | OPN1LW, OPN1MW, and LCR |
| Breast Cancer | Breast tissue | | BRCA1, BRCA2, COX-2 |
| Bruton's Disease (aka X-linked | Immune system, | | BTK |
| Agammglobulinemia) | specifically B | | |
| | cells | | |
| Cancers (e.g., lymphoma, chronic | Various | | FAS, BID, CTLA4, PDCD1, CBLB, |
| lymphocytic leukemia (CLL), B | | | PTPN6, TRAC, TRBC, those |
| cell acute lymphocytic leukemia | | | described in WO2015048577 |
| (B-ALL), acute lymphoblastic | | | |
| leukemia, acute myeloid | | | |
| leukemia, non-Hodgkin's | | | |
| lymphoma (NHL), diffuse large | | | |
| cell lymphoma (DLCL), multiple | | | |
| myeloma, renal cell carcinoma | | | |
| (RCC), neuroblastoma, colorectal | | | |
| cancer, breast cancer, ovarian | | | |
| cancer, melanoma, sarcoma, | | | |
| prostate cancer, lung cancer, | | | |
| esophageal cancer, hepatocellular | | | |
| carcinoma, pancreatic cancer, | | | |
| astrocytoma, mesothelioma, head | | | |
| and neck cancer, and | | | |
| medulloblastoma | | | |
| Cardiovascular Diseases | heart | Vascular system | IL1B, XDH, TP53, PTGS, MB, IL4, |
| | | | ANGPT1, ABCGu8, CTSK, PTGIR, |
| | | | KCNJ11, INS, CRP, PDGFRB, |
| | | | CCNA2, PDGFB, KCNJ5, KCNN3, |
| | | | CAPN10, ADRA2B, ABCG5, |
| | | | PRDX2, CPAN5, PARP14, MEX3C, |
| | | | ACE, RNF, IL6, TNF, STN, |
| | | | SERPINE1, ALB, ADIPOQ, APOB, |
| | | | APOE, LEP, MTHFR, APOA1, |
| | | | EDN1, NPPB, NOS3, PPARG, PLAT, |
| | | | PTGS2, CETP, AGTR1, HMGCR, |
| | | | IGF1, SELE, REN, PPARA, PON1, |
| | | | KNG1, CCL2, LPL, VWF, F2, |
| | | | ICAM1, TGFB, NPPA, IL10, EPO, |
| | | | SOD1, VCAM1, IFNG, LPA, MPO, |
| | | | ESR1, MAPK, HP, F3, CST3, COG2, |
| | | | MMP9, SERPINC1, F8, HMOX1, |
| | | | APOC3, IL8, PROL1, CBS, NOS2, |
| | | | TLR4, SELP, ABCA1, AGT, LDLR, |
| | | | GPT, VEGFA, NR3C2, IL18, NOS1, |
| | | | NR3C1, FGB, HGF, ILIA, AKT1, |
| | | | LIPC, HSPD1, MAPK14, SPP1, |
| | | | ITGB3, CAT, UTS2, THBD, F10, CP, |
| | | | TNFRSF11B, EGFR, MMP2, PLG, |
| | | | NPY, RHOD, MAPK8, MYC, FN1, |
| | | | CMA1, PLAU, GNB3, ADRB2, |
| | | | SOD2, F5, VDR, ALOX5, HLA- |
| | | | DRB1, PARP1, CD40LG, PON2, |
| | | | AGER, IRS1, PTGS1, ECE1, F7, |
| | | | IRMN, EPHX2, IGFBP1, MAPK10, |
| | | | FAS, ABCB1, JUN, IGFBP3, CD14, |
| | | | PDE5A, AGTR2, CD40, LCAT, |
| | | | CCR5, MMP1, TIMP1, ADM, |
| | | | DYT10, STAT3, MMP3, ELN, USF1, |
| | | | CFH, HSPA4, MMP12, MME, F2R, |
| | | | SELL, CTSB, ANXA5, ADRB1, |
| | | | CYBA, FGA, GGT1, LIPG, HIF1A, |
| | | | CXCR4, PROC, SCARB1, CD79A, |
| | | | PLTP, ADD1, FGG, SAA1, KCNH2, |
| | | | DPP4, NPR1, VTN, KIAA0101, FOS, |
| | | | TLR2, PPIG, IL1R1, AR, CYP1A1, |
| | | | SERPINA1, MTR, RBP4, APOA4, |
| | | | CDKN2A, FGF2, EDNRB, ITGA2, |
| | | | VLA-2, CABIN1, SHBG, HMGB1, |
| | | | HSP90B2P, CYP3A4, GJA1, CAV1, |
| | | | ESR2, LTA, GDF15, BDNF, |
| | | | CYP2D6, NGF, SP1, TGIF1, SRC, |
| | | | EGF, PIK3CG, HLA-A, KCNQ1, |
| | | | CNR1, FBN1, CHKA, BEST1, |
| | | | CTNNB1, IL2, CD36, PRKAB1, TPO, |
| | | | ALDH7A1, CX3CR1, TH, F9, CH1, |
| | | | TF, HFE, IL17A, PTEN, GSTM1, |
| | | | DMD, GATA4, F13A1, TTR, FABP4, |
| | | | PON3, APOC1, INSR, TNFRSF1B, |
| | | | HTR2A, CSF3, CYP2C9, TXN, |
| | | | CYP11B2, PTH, CSF2, KDR, |
| | | | PLA2G2A, THBS1, GCG, RHOA, |
| | | | ALDH2, TCF7L2, NFE2L2, |
| | | | NOTCH1, UGT1A1, IFNA1, PPARD, |
| | | | SIRT1, GNHR1, PAPPA, ARR3, |
| | | | NPPC, AHSP, PTK2, IL13, MTOR, |
| | | | ITGB2, GSTT1, IL6ST, CPB2, |
| | | | CYP1A2, HNF4A, SLC64A, |
| | | | PLA2G6, TNFSF11, SLC8A1, F2RL1, |
| | | | AKR1A1, ALDH9A1, BGLAP, |
| | | | MTTP, MTRR, SULT1A3, RAGE, |
| | | | C4B, P2RY12, RNLS, CREB1, |
| | | | POMC, RAC1, LMNA, CD59, |
| | | | SCM5A, CYP1B1, MIF, MMP13, |
| | | | TIMP2, CYP19A1, CUP21A2, |
| | | | PTPN22, MYH14, MBL2, SELPLG, |
| | | | AOC3, CTSL1, PCNA, IGF2, ITGB1, |
| | | | CAST, CXCL12, IGHE, KCNE1, |
| | | | TFRC, COL1A1, COL1A2, IL2RB, |
| | | | PLA2G10, ANGPT2, PROCR, NOX4, |
| | | | HAMP, PTPN11, SLCA1, IL2RA, |
| | | | CCL5, IRF1, CF:AR, CA:CA, EIF4E, |
| | | | GSTP1, JAK2, CYP3A5, HSPG2, |
| | | | CCL3, MYD88, VIP, SOAT1, |
| | | | ADRBK1, NR4A2, MMP8, NPR2, |
| | | | GCH1, EPRS, PPARGC1A, F12, |
| | | | PECAM1, CCL4, CERPINA34, |
| | | | CASR, FABP2, TTF2, PROS1, CTF1, |
| | | | SGCB, YME1L1, CAMP, ZC3H12A, |
| | | | AKR1B1, MMP7, AHR, CSF1, |
| | | | HDAC9, CTGF, KCNMA1, UGT1A, |
| | | | PRKCA, COMT, S100B, EGR1, PRL, |
| | | | IL15, DRD4, CAMK2G, SLC22A2, |
| | | | CCL11, PGF, THPO, GP6, TACR1, |
| | | | NTS, HNF1A, SST, KCDN1, |
| | | | LOC646627, TBXAS1, CUP2J2, |
| | | | TBXA2R, ADH1C, ALOX12, AHSG, |
| | | | BHMT, GJA4, SLC25A4, ACLY, |
| | | | ALOX5AP, NUMA1, CYP27B1, |
| | | | CYSLTR2, SOD3, LTC4S, UCN, |
| | | | GHRL, APOC2, CLEC4A, |
| | | | KBTBD10, TNC, TYMS, SHC1, |
| | | | LRP1, SOCS3, ADH1B, KLK3, |
| | | | HSD11B1, VKORC1, SERPINB2, |
| | | | TNS1, RNF19A, EPOR, ITGAM, |
| | | | PITX2, MAPK7, FCGR3A, LEEPR, |
| | | | ENG, GPX1, GOT2, HRH1, NR112, |
| | | | CRH, HTR1A, VDAC1, HPSE, |
| | | | SFTPD, TAP2, RMF123, PTK2Bm |
| | | | NTRK2, IL6R, ACHE, GLP1R, GHR, |
| | | | GSR, NQO1, NR5A1, GJB2, |
| | | | SLC9A1, MAOA, PCSK9, FCGR2A, |
| | | | SERPINF1, EDN3, UCP2, TFAP2A, |
| | | | C4BPA, SERPINF2, TYMP, ALPP, |
| | | | CXCR2, SLC3A3, ABCG2, ADA, |
| | | | JAK3, HSPA1A, FASN, FGF1, F11, |
| | | | ATP7A, CR1, GFPA, ROCK1, |
| | | | MECP2, MYLK, BCHE, LIPE, |
| | | | ADORA1, WRN, CXCR3, CD81, |
| | | | SMAD7, LAMC2, MAP3K5, CHGA, |
| | | | IAPP, RHO, ENPP1, PTHLH, NRG1, |
| | | | VEGFC, ENPEP, CEBPB, NAGLU,. |
| | | | F2RL3, CX3CL1, BDKRB1, |
| | | | ADAMTS13, ELANE, ENPP2, CISH, |
| | | | GAST, MYOC, ATP1A2, NF1, GJB1, |
| | | | MEF2A, VCL, BMPR2, TUBB, |
| | | | CDC42, KRT18, HSF1, MYB, |
| | | | PRKAA2, ROCK2, TFP1, PRKG1, |
| | | | BMP2, CTNND1, CTH, CTSS, |
| | | | VAV2, NPY2R, IGFBP2, CD28, |
| | | | GSTA1, PPIA, APOH, S100A8, IL11, |
| | | | ALOX15, FBLN1, NR1H3, SCD, GIP, |
| | | | CHGB, PRKCB, SRD5A1, HSD11B2, |
| | | | CALCRL, GALNT2, ANGPTL4, |
| | | | KCNN4, PIK3C2A, HBEGF, |
| | | | CYP7A1, HLA-DRB5, BNIP3, |
| | | | GCKR, S100A12, PADI4, HSPA14, |
| | | | CXCR1, H19, KRTAP19-3, IDDM2, |
| | | | RAC2, YRY1, CLOCK, NGFR, DBH, |
| | | | CHRNA4, CACNA1C, PRKAG2, |
| | | | CHAT, PTGDS, NR1H2, TEK, |
| | | | VEGFB, MEF2C, MAPKAPK2, |
| | | | TNFRSF11A, HSPA9, CYSLTR1, |
| | | | MAT1A, OPRL1, IMPA1, CLCN2, |
| | | | DLD, PSMA6, PSMB8, CHI3L1, |
| | | | ALDH1B1, PARP2, STAR, LBP, |
| | | | ABCC6, RGS2, EFNB2, GJB6, |
| | | | APOA2, AMPD1, DYSF, |
| | | | FDFT1, EMD2, CCR6, GJB3, IL1RL1, |
| | | | ENTPD1, BBS4, CELSR2, F11R, |
| | | | RAPGEF3, HYAL1, ZNF259, |
| | | | ATOX1, ATF6, KHK, SAT1, GGH, |
| | | | TIMP4, SLC4A4, PDE2A, PDE3B, |
| | | | FADS1, FADS2, TMSB4X, TXNIP, |
| | | | LIMS1, RHOB, LY96, FOXO1, |
| | | | PNPLA2, TRH, GJC1, S:C17A5, FTO, |
| | | | GJD2, PRSC1, CASP12, GPBAR1, |
| | | | PXK, IL33, TRIB1, PBX4, NUPR1, |
| | | | 15-SEP, CILP2, TERC, GGT2, |
| | | | MTCO1, UOX, AVP |
| Cataract | eye | | CRYAA, CRYA1, CRYBB2, CRYB2, |
| | | | PITX3, BFSP2, CP49, CP47, CRYAA, |
| | | | CRYA1, PAX6, AN2, MGDA, |
| | | | CRYBA1, CRYB1, CRYGC, CRYG3, |
| | | | CCL, LIM2, MP19, CRYGD, CRYG4, |
| | | | BFSP2, CP49, CP47, HSF4, CTM, |
| | | | HSF4, CTM, MIP, AQP0, CRYAB, |
| | | | CRYA2, CTPP2, CRYBB1, CRYGD, |
| | | | CRYG4, CRYBB2, CRYB2, CRYGC, |
| | | | CRYG3, CCL, CRYAA, CRYA1, |
| | | | GJA8, CX50, CAE1, GJA3, CX46, |
| | | | CZP3, CAE3, CCM1, CAM, KRIT1 |
| CDKL-5 Deficiencies or | Brain, CNS | | CDKL5 |
| Mediated Diseases | | | |
| Charcot-Marie-Tooth (CMT) | Nervous system | Muscles | PMP22 (CMT1A and E), MPZ |
| disease (Types 1, 2, 3, 4,) | | (dystrophy) | (CMT1B), LITAF (CMT1C), EGR2 |
| | | | (CMT1D), NEFL (CMT1F), GJB1 |
| | | | (CMT1X), MFN2 (CMT2A), KIF1B |
| | | | (CMT2A2B), RAB7A (CMT2B), |
| | | | TRPV4 (CMT2C), GARS (CMT2D), |
| | | | NEFL (CMT2E), GAPD1 (CMT2K), |
| | | | HSPB8 (CMT2L), DYNC1H1, |
| | | | CMT2O), LRSAM1 (CMT2P), |
| | | | IGHMBP2 (CMT2S), MORC2 |
| | | | (CMT2Z), GDAP1 (CMT4A), |
| | | | MTMR2 or SBF2/MTMR13 |
| | | | (CMT4B), SH3TC2 (CMT4C), |
| | | | NDRG1 (CMT4D), PRX (CMT4F), |
| | | | FIG4 (CMT4J), NT-3 |
| Chédiak-Higashi Syndrome | Immune system | Skin, hair, eyes, | LYST |
| | | neurons | |
| Choroidermia | | | CHM, REP1, |
| Chorioretinal atrophy | eye | | PRDM13, RGR, TEAD1 |
| Chronic Granulomatous Disease | Immune system | | CYBA, CYBB, NCF1, NCF2, NCF4 |
| Chronic Mucocutaneous | Immune system | | AIRE, CARD9, CLEC7A IL12B, |
| Candidiasis | | | IL12B1, IL1F, IL17RA, IL17RC, |
| | | | RORC, STAT1, STAT3, TRAF31P2 |
| Cirrhosis | liver | | KRT18, KRT8, CIRH1A, NAIC, |
| | | | TEX292, KIAA1988 |
| Colon cancer (Familial | Gastrointestinal | | FAP: APC HNPCC: |
| adenomatous polyposis (FAP) | | | MSH2, MLH1, PMS2, SH6, PMS1 |
| and hereditary nonpolyposis | | | |
| colon cancer (HNPCC)) | | | |
| Combined Immunodeficiency | Immune System | | IL2RG, SCIDX1, SCIDX, IMD4); |
| | | | HIV-1 (CCL5, SCYA5, D17S136E, |
| | | | TCP228 |
| Cone(-rod) dystrophy | eye | | AIPL1, CRX, GUA1A, GUCY2D, |
| | | | PITPM3, PROM1, PRPH2, RIMS1, |
| | | | SEMA4A, ABCA4, ADAM9, ATF6, |
| | | | C21ORF2, C8ORF37, CACNA2D4, |
| | | | CDHR1, CERKL, CNGA3, CNGB3, |
| | | | CNNM4, CNAT2, IFT81, KCNV2, |
| | | | PDE6C, PDE6H, POC1B, RAX2, |
| | | | RDH5, RPGRIP1, TTLL5, RetCG1, |
| | | | GUCY2E |
| Congenital Stationary Night | eye | | CABP4, CACNA1F, CACNA2D4, |
| Blindness | | | GNAT1, CPR179, GRK1, GRM6, |
| | | | LRIT3, NYX, PDE6B, RDH5, RHO, |
| | | | RLBP1, RPE65, SAG, SLC24A1, |
| | | | TRPM1, |
| Congenital Fructose Intolerance | Metabolism | | ALDOB |
| Cori's Disease (Glycogen Storage | Various- | | AGL |
| Disease Type III) | wherever | | |
| | glycogen | | |
| | accumulates, | | |
| | particularly | | |
| | liver, heart, | | |
| | skeletal muscle | | |
| Corneal clouding and dystrophy | eye | | APOA1, TGFBI, CSD2, CDGG1, |
| | | | CSD, BIGH3, CDG2, TACSTD2, |
| | | | TROP2, M1S1, VSX1, RINX, PPCD, |
| | | | PPD, KTCN, COL8A2, FECD, |
| | | | PPCD2, PIP5K3, CFD |
| Cornea plana congenital | | | KERA, CNA2 |
| Cri du chat Syndrome, also | | | Deletions involving only band 5p15.2 |
| known as 5p syndrome and cat | | | to the entire short arm of chromosome |
| cry syndrome | | | 5, e.g. CTNND2, TERT, |
| Cystic Fibrosis (CF) | Lungs and | Pancreas, liver, | CTFR, ABCC7, CF, MRP7, SCNN1A, |
| | respiratory | digestive | those described in WO2015157070 |
| | system | system, | |
| | | reproductive | |
| | | system, | |
| | | exocrine, glands, | |
| Diabetic nephropathy | kidney | | Gremlin, 12/15- lipoxygenase, TIM44, |
| Dent Disease (Types 1 and 2) | Kidney | | Type 1: CLCN5, Type 2: ORCL |
| Dentatorubro-Pallidoluysian | CNS, brain, | | Atrophin-1 and Atn1 |
| Atrophy (DRPLA) (aka Haw | muscle | | |
| River and Naito-Oyanagi | | | |
| Disease) | | | |
| Down Syndrome | various | | Chromosome 21 trisomy |
| Drug Addiction | Brain | | Prkce; Drd2; Drd4; ABAT; |
| | | | GRIA2; Grm5; Grin1; Htr1b; Grin2a; |
| | | | Drd3; Pdyn; Gria1 |
| Duane syndrome (Types 1, 2, and | eye | | CHN1, indels on chromosomes 4 and 8 |
| 3, including subgroups A, B and | | | |
| C). Other names for this | | | |
| condition include: Duane's | | | |
| Retraction Syndrome (or DR | | | |
| syndrome), Eye Retraction | | | |
| Syndrome, Retraction Syndrome, | | | |
| Congenital retraction syndrome | | | |
| and Stilling-Turk-Duane | | | |
| Syndrome | | | |
| Duchenne muscular dystrophy | muscle | Cardiovascular, | DMD, BMD, dystrophin gene, intron |
| (DMD) | | respiratory | flanking exon 51 of DMD gene, exon |
| | | | 51 mutations in DMD gene, see also |
| | | | WO2013163628 and US Pat. Pub. |
| | | | 20130145487 |
| Edward's Syndrome | | | Complete or partial trisomy of |
| (Trisomy 18) | | | chromosome 18 |
| Ehlers-Danlos Syndrome (Types | Various | | COL5A1, COL5A2, COL1A1, |
| I-VI) | depending on | | COL3A1, TNXB, PLOD1, COL1A2, |
| | type: including | | FKBP14 and ADAMTS2 |
| | musculoskeletal, | | |
| | eye, vasculature, | | |
| | immune, and | | |
| | skin | | |
| Emery-Dreifuss muscular | muscle | | LMNA, LMN1, EMD2, FPLD, |
| dystrophy | | | CMD1A, HGPS, LGMD1B, LMNA, |
| | | | LMN1, EMD2, FPLD, CMD1A |
| Enhanced S-Cone Syndrome | eye | | NR2E3, NRL |
| Fabry's Disease | Various - | | GLA |
| | including skin, | | |
| | eyes, and | | |
| | gastrointestinal | | |
| | system, kidney, | | |
| | heart, brain, | | |
| | nervous system | | |
| Facioscapulohumeral muscular | muscles | | FSHMD1A, FSHD1A, FRG1, |
| dystrophy | | | |
| Factor H and Factor H-like 1 | blood | | HF1, CFH, HUS |
| Factor V Leiden thrombophilia | blood | | Factor V (F5) |
| and Factor V deficiency | | | |
| Factor V and Factor VII | blood | | MCFD2 |
| deficiency | | | |
| Factor VII deficiency | blood | | F7 |
| Factor X deficiency | blood | | F10 |
| Factor XI deficiency | blood | | F11 |
| Factor XII deficiency | blood | | F12, HAF |
| Factor XIIIA deficiency | blood | | F13A1, F13A |
| Factor XIIIB deficiency | blood | | F13B |
| Familial Hypercholestereolemia | Cardiovascular | | APOB, LDLR, PCSK9 |
| | system | | |
| Familial Mediterranean Fever | Various- | Heart, kidney, | MEFV |
| (FMF) also called recurrent | organs/tissues | brain/CNS, | |
| polyserositis or familial | with serous or | reproductive | |
| paroxysmal polyserositis | synovial | organs | |
| | membranes, | | |
| | skin, joints | | |
| Fanconi Anemia | Various - blood | | FANCA, FACA, FA1, FA, FAA, |
| | (anemia), | | FAAP95, FAAP90, FLJ34064, |
| | immune system, | | FANCC, FANCG, RAD51, BRCA1, |
| | cognitive, | | BRCA2, BRIP1, BACH1, FANCJ, |
| | kidneys, eyes, | | FANCB, FANCD1, FANCD2, |
| | musculoskeletal | | FANCD, FAD, FANCE, FACE, |
| | | | FANCF, FANCI, ERCC4, FANCL, |
| | | | FANCM, PALB2, RAD51C, SLX4, |
| | | | UBE2T, FANCB, XRCC9, PHF9, |
| | | | KIAA1596 |
| Fanconi Syndrome Types I | kidneys | | FRTS1, GATM |
| (Childhood onset) and II (Adult | | | |
| Onset) | | | |
| Fragile X syndrome and related | brain | | FMR1, FMR2; FXR1; FXR2; |
| disorders | | | mGLUR5 |
| Fragile XE Mental Retardation | Brain, nervous | | FMR1 |
| (aka Martin Bell syndrome) | system | | |
| Friedreich Ataxia (FRDA) | Brain, nervous | heart | FXN/X25 |
| | system | | |
| Fuchs endothelial corneal | Eye | | TCF4; COL8A2 |
| dystrophy | | | |
| Galactosemia | Carbohydrate | Various-where | GALT, GALK1, and GALE |
| | metabolism | galactose | |
| | disorder | accumulates - | |
| | | liver, brain, eyes | |
| Gastrointestinal Epithelial | | | CISH |
| Cancer, GI cancer | | | |
| Gaucher Disease (Types 1, 2, and | Fat metabolism | Various-liver, | GBA |
| 3, as well as other unusual forms | disorder | spleen, blood, | |
| that may not fit into these types) | | CNS, skeletal | |
| | | system | |
| Griscelli syndrome | | | |
| Glaucoma | eye | | MYOC, TIGR, GLC1A, JOAG, |
| | | | GPOA, OPTN, GLC1E, FIP2, HYPL, |
| | | | NRP, CYP1B1, GLC3A, OPA1, NTG, |
| | | | NPG, CYP1B1, GLC3A, those |
| | | | described in WO2015153780 |
| Glomerulo sclerosis | kidney | | CC chemokine ligand 2 |
| Glycogen Storage Diseases | Metabolism | | SLC2A2, GLUT2, G6PC, G6PT, |
| Types I-VI -See also Cori's | Diseases | | G6PT1, GAA, LAMP2, LAMPB, |
| Disease, Pompe's Disease, | | | AGL, GDE, GBE1, GYS2, PYGL, |
| McArdle's disease, Hers Disease, | | | PFKM, see also Cori's Disease, |
| and Von Gierke's disease | | | Pompe's Disease, McArdle's disease, |
| | | | Hers Disease, and Von Gierke's |
| | | | disease |
| RBC Glycolytic enzyme | blood | | any mutations in a gene for an enzyme |
| deficiency | | | in the glycolysis pathway including |
| | | | mutations in genes for hexokinases I |
| | | | and II, glucokinase, phosphoglucose |
| | | | isomerase, phosphofructokinase, |
| | | | aldolase Bm triosephosphate |
| | | | isomerease, glyceraldehydee-3- |
| | | | phosphate dehydrogenase, |
| | | | phosphoglycerokinase, |
| | | | phosphoglycerate mutase, enolase I, |
| | | | pyruvate kinase |
| Hartnup's disease | Malabsorption | Various- brain, | SLC6A19 |
| | disease | gastrointestinal, | |
| | | skin, | |
| Hearing Loss | ear | | NOX3, Hes5, BDNF, |
| Hemochromatosis (HH) | Iron absorption | Various- | HFE and H63D |
| | regulation | wherever iron | |
| | disease | accumulates, | |
| | | liver, heart, | |
| | | pancreas, joints, | |
| | | pituitary gland | |
| Hemophagocytic | blood | | PRF1, HPLH2, UNC13D, MUNC13- |
| lymphohistiocytosis disorders | | | 4, HPLH3, HLH3, FHL3 |
| Hemorrhagic disorders | blood | | PI, ATT, F5 |
| Hers disease (Glycogen storage | liver | muscle | PYGL |
| disease Type VI) | | | |
| Hereditary angioedema (HAE) | | | kalikrein B1 |
| Hereditary Hemorrhagic | Skin and | | ACVRL1, ENG and SMAD4 |
| Telangiectasia (Osler-Weber- | mucous | | |
| Rendu Syndrome) | membranes | | |
| Hereditary Spherocytosis | blood | | NK1, EPB42, SLC4A1, SPTA1, and |
| | | | SPTB |
| Hereditary Persistence of Fetal | blood | | HBG1, HBG2, BCL11A, promoter |
| Hemoglobin | | | region of HBG 1 and/or 2 (in the |
| | | | CCAAT box) |
| Hemophilia (hemophilia A | blood | | A: FVIII, F8C, HEMA |
| (Classic) a B (aka Christmas | | | B: FVIX, HEMB, FIX |
| disease) and C) | | | C: F9, F11 |
| Hepatic adenoma | liver | | TCF1, HNF1A, MODY3 |
| Hepatic failure, early onset, and | liver | | SCOD1, SCO1 |
| neurologic disorder | | | |
| Hepatic lipase deficiency | liver | | LIPC |
| Hepatoblastoma, cancer and | liver | | CTNNB1, PDGFRL, PDGRL, PRLTS, |
| carcinomas | | | AXIN1, AXIN, CTNNB1, TP53, P53, |
| | | | LFS1, IGF2R, MPRI, MET, CASP8, |
| | | | MCH5 |
| Hermansky-Pudlak syndrome | Skin, eyes, | | HPS1, HPS3, HPS4, HPS5, HPS6, |
| | blood, lung, | | HPS7, DTNBP1, BLOC1, BLOC1S2, |
| | kidneys, | | BLOC3 |
| | intestine | | |
| HIV susceptibility or infection | Immune system | | IL10, CSIF, CMKBR2, CCR2, |
| | | | CMKBR5, CCCKR5 (CCR5), those in |
| | | | WO2015148670A1 |
| Holoprosencephaly (HPE) | brain | | ACVRL1, ENG, SMAD4 |
| (Alobar, Semilobar, and Lobar) | | | |
| Homocystinuria | Metabolic | Various- | CBS, MTHFR, MTR, MTRR, and |
| | disease | connective | MMADHC |
| | | tissue, muscles, | |
| | | CNS, | |
| | | cardiovascular | |
| | | system | |
| HPV | | | HPV16 and HPV18 E6/E7 |
| HSV1, HSV2, and related | eye | | HSV1 genes (immediate early and late |
| keratitis | | | HSV-1 genes (UL1, 1.5, 5, 6, 8, 9, 12, |
| | | | 15, 16, 18, 19, 22, 23, 26, 26.5, 27, 28, |
| | | | 29, 30, 31, 32, 33, 34, 35, 36, 37, 38, |
| | | | 42, 48, 49.5, 50, 52, 54, S6, RL2, RS1, |
| | | | those described in WO2015153789, |
| | | | WO2015153791 |
| Hunter's Syndrome (aka | Lysosomal | Various- liver, | IDS |
| Mucopolysaccharidosis type II) | storage disease | spleen, eye, | |
| | | joint, heart, | |
| | | brain, skeletal | |
| Huntington's disease (HD) and | Brain, nervous | | HD, HTT, IT15, PRNP, PRIP, JPH3, |
| HD-like disorders | system | | JP3, HDL2, TBP, SCA17, PRKCE; |
| | | | IGF1; EP300; RCOR1; PRKCZ; |
| | | | HDAC4; and TGM2, and those |
| | | | described in WO2013130824, |
| | | | WO2015089354 |
| Hurler's Syndrome (aka | Lysosomal | Various- liver, | IDUA, α-L-iduronidase |
| mucopolysaccharidosis type I H, | storage disease | spleen, eye, | |
| MPS IH) | | joint, heart, | |
| | | brain, skeletal | |
| Hurler-Scheie syndrome (aka | Lysosomal | Various- liver, | IDUA, α-L-iduronidase |
| mucopolysaccharidosis type I H- | storage disease | spleen, eye, | |
| S, MPS I H-S) | | joint, heart, | |
| | | brain, skeletal | |
| hyaluronidase deficiency (aka | Soft and | | HYAL1 |
| MPS IX) | connective | | |
| | tissues | | |
| Hyper IgM syndrome | Immune system | | CD40L |
| Hyper- tension caused renal | kidney | | Mineral corticoid receptor |
| damage | | | |
| Immunodeficiencies | Immune System | | CD3E, CD3G, AICDA, AID, HIGM2, |
| | | | TNFRSF5, CD40, UNG, DGU, |
| | | | HIGM4, TNFSF5, CD40LG, HIGM1, |
| | | | IGM, FOXP3, IPEX, AIID, XPID, |
| | | | PIDX, TNFRSF14B, TACI |
| Inborn errors of metabolism: | Metabolism | Various organs | See also: Carbohydrate metabolism |
| including urea cycle disorders, | diseases, liver | and cells | disorders (e.g. galactosemia), Amino |
| organic acidemias), fatty acid | | | acid Metabolism disorders (e.g. |
| oxidation defects, amino | | | phenylketonuria), Fatty acid |
| acidopathies, carbohydrate | | | metabolism (e.g. MCAD deficiency), |
| disorders, mitochondrial | | | Urea Cycle disorders (e.g. |
| disorders | | | Citrullinemia), Organic acidemias (e.g. |
| | | | Maple Syrup Urine disease), |
| | | | Mitochondrial disorders (e.g. |
| | | | MELAS), peroxisomal disorders (e.g. |
| | | | Zellweger syndrome) |
| Inflammation | Various | | IL-10; IL-1 (IL-1a; IL-1b); IL-13; IL- |
| | | | 17 (IL-17a (CTLA8); IL- |
| | | | 17b; IL-17c; IL-17d; IL-17f); II-23; |
| | | | Cx3cr1; ptpn22; TNFa; |
| | | | NOD2/CARD15 for IBD; IL-6; IL-12 |
| | | | (IL-12a; IL-12b); |
| | | | CTLA4; Cx3cl1 |
| Inflammatory Bowel Diseases | Gastrointestinal | Joints, skin | NOD2, IRGM, LRRK2, ATG5, |
| (e.g. Ulcerative Colitis and | | | ATG16L1, IRGM, GATM, ECM1, |
| Chron's Disease) | | | CDH1, LAMB1, HNF4A, GNA12, |
| | | | IL10, CARD9/15. CCR6, IL2RA, |
| | | | MST1, TNFSF15, REL, STAT3, |
| | | | IL23R, IL12B, FUT2 |
| Interstitial renal fibrosis | kidney | | TGF-β type II receptor |
| Job's Syndrome (aka Hyper IgE | Immune System | | STAT3, DOCK8 |
| Syndrome) | | | |
| Juvenile Retinoschisis | eye | | RS1, XLRS1 |
| Kabuki Syndrome 1 | | | MLL4, KMT2D |
| Kennedy Disease (aka | Muscles, brain, | | SBMA/SMAX1/AR |
| Spinobulbar Muscular Atrophy) | nervous system | | |
| Klinefelter syndrome | Various- | | Extra X chromosome in males |
| | particularly | | |
| | those involved | | |
| | in development | | |
| | of male | | |
| | characteristics | | |
| Lafora Disease | Brain, CNS | | EMP2A and EMP2B |
| Leber Congenital Amaurosis | eye | | CRB1, RP12, CORD2, CRD, CRX, |
| | | | IMPDH1, OTX2, AIPL1, CABP4, |
| | | | CCT2, CEP290, CLUAP1, CRB1, |
| | | | CRX, DTHD1, GDF6, GUCY2D, |
| | | | IFT140, IQCB1, KCNJ13, LCA5, |
| | | | LRAT, NMNAT1, PRPH2, RD3, |
| | | | RDH12, RPE65, RP20, RPGRIP1, |
| | | | SPATA7, TULP1, LCA1, LCA4, |
| | | | GUC2D, CORD6, LCA3, |
| Lesch-Nyhan Syndrome | Metabolism | Various - joints, | HPRT1 |
| | disease | cognitive, brain, | |
| | | nervous system | |
| Leukocyte deficiencies and | blood | | ITGB2, CD18, LCAMB, LAD, |
| disorders | | | EIF2B1, EIF2BA, EIF2B2, EIF2B3, |
| | | | EIF2B5, LVWM, CACH, CLE, |
| | | | EIF2B4 |
| Leukemia | Blood | | TAL1, TCL5, SCL, TAL2, FLT3, |
| | | | NBS1, NBS, ZNFN1A1, IK1, LYF1, |
| | | | HOXD4, HOX4B, BCR, CML, PHL, |
| | | | ALL, ARNT, KRAS2, RASK2, |
| | | | GMPS, AF10, ARHGEF12, LARG, |
| | | | KIAA0382, CALM, CLTH, CEBPA, |
| | | | CEBP, CHIC2, BTL, FLT3, KIT, |
| | | | PBT, LPP, NPM1, NUP214, D9S46E, |
| | | | CAN, CAIN, RUNX1, CBFA2, |
| | | | AML1, WHSC1L1, NSD3, FLT3, |
| | | | AF1Q, NPM1, NUMA1, ZNF145, |
| | | | PLZF, PML, MYL, STAT5B, AF10, |
| | | | CALM, CLTH, ARL11, ARLTS1, |
| | | | P2RX7, P2X7, BCR, CML, PHL, |
| | | | ALL, GRAF, NF1, VRNF, WSS, |
| | | | NFNS, PTPN11, PTP2C, SHP2, NS1, |
| | | | BCL2, CCND1, PRAD1, BCL1, |
| | | | TCRA, GATA1, GF1, ERYF1, NFE1, |
| | | | ABL1, NQO1, DIA4, NMOR1, |
| | | | NUP214, D9S46E, CAN, CAIN |
| Limb-girdle muscular dystrophy | muscle | | LGMD |
| diseases | | | |
| Lowe syndrome | brain, eyes, | | OCRL |
| | kidneys | | |
| Lupus glomerulo- nephritis | kidney | | MAPK1 |
| Machado- | Brain, CNS, | | ATX3 |
| Joseph's Disease (also known as | muscle | | |
| Spinocerebellar ataxia Type 3) | | | |
| Macular degeneration | eye | | ABC4, CBC1, CHM1, APOE, |
| | | | C1QTNF5, C2, C3, CCL2, CCR2, |
| | | | CD36, CFB, CFH, CFHR1, CFHR3, |
| | | | CNGB3, CP, CRP, CST3, CTSD, |
| | | | CX3CR1, ELOVL4, ERCC6, FBLN5, |
| | | | FBLN6, FSCN2, HMCN1, HIRA1, |
| | | | IL6, IL8, PLEKHA1, PROM1, |
| | | | PRPH2, RPGR, SERPING1, TCOF1, |
| | | | TIMP3, TLR3 |
| Macular Dystrophy | eye | | BEST1, C1QTNF5, CTNNA1, |
| | | | EFEMP1, ELOVL4, FSCN2, |
| | | | GUCA1B, HMCN1, IMPG1, OTX2, |
| | | | PRDM13, PROM1, PRPH2, RP1L1, |
| | | | TIMP3, ABCA4, CFH, DRAM2, |
| | | | IMG1, MFSD8, ADMD, STGD2, |
| | | | STGD3, RDS, RP7, PRPH, AVMD, |
| | | | AOFMD, VMD2 |
| Malattia Leventinesse | eye | | EFEMP1, FBLN3 |
| Maple Syrup Urine Disease | Metabolism | | BCKDHA, BCKDHB, and DBT |
| | disease | | |
| Marfan syndrome | Connective | Musculoskeletal | FBN1 |
| | tissue | | |
| Maroteaux-Lamy Syndrome (aka | Musculoskeletal | Liver, spleen | ARSB |
| MPS VI) | system, nervous | | |
| | system | | |
| McArdle's Disease (Glycogen | Glycogen | muscle | PYGM |
| Storage Disease Type V) | storage disease | | |
| Medullary cystic kidney disease | kidney | | UMOD, HNFJ, FJHN, MCKD2, |
| | | | ADMCKD2 |
| Metachromatic leukodystrophy | Lysosomal | Nervous system | ARSA |
| | storage disease | | |
| Methylmalonic acidemia (MMA) | Metabolism | | MMAA, MMAB, MUT, MMACHC, |
| | disease | | MMADHC, LMBRD1 |
| Morquio Syndrome (aka MPS IV | Connective | heart | GALNS |
| A and B) | tissue, skin, | | |
| | bone, eyes | | |
| Mucopolysaccharidosis diseases | Lysosomal | | See also Hurler/Scheie syndrome, |
| (Types I H/S, I H, II, III A B and | storage disease - | | Hurler disease, Sanfillipo syndrome, |
| C, I S, IVA and B, IX, VII, and | affects various | | Scheie syndrome, Morquio syndrome, |
| VI) | organs/tissues | | hyaluronidase deficiency, Sly |
| | | | syndrome, and Maroteaux-Lamy |
| | | | syndrome |
| Muscular Atrophy | muscle | | VAPB, VAPC, ALS8, SMN1, SMA1, |
| | | | SMA2, SMA3, SMA4, BSCL2, |
| | | | SPG17, GARS, SMAD1, CMT2D, |
| | | | HEXB, IGHMBP2, SMUBP2, |
| | | | CATF1, SMARD1 |
| Muscular dystrophy | muscle | | FKRP, MDC1C, LGMD2I, LAMA2, |
| | | | LAMM, LARGE, KIAA0609, |
| | | | MDC1D, FCMD, TTID, MYOT, |
| | | | CAPN3, CANP3, DYSF, LGMD2B, |
| | | | SGCG, LGMD2C, DMDA1, SCG3, |
| | | | SGCA, ADL, DAG2, LGMD2D, |
| | | | DMDA2, SGCB, LGMD2E, SGCD, |
| | | | SGD, LGMD2F, CMD1L, TCAP, |
| | | | LGMD2G, CMD1N, TRIM32, HT2A, |
| | | | LGMD2H, FKRP, MDC1C, LGMD2I, |
| | | | TTN, CMD1G, TMD, LGMD2J, |
| | | | POMT1, CAV3, LGMD1C, SEPN1, |
| | | | SELN, RSMD1, PLEC1, PLTN, EBS1 |
| Myotonic dystrophy (Type 1 and | Muscles | Eyes, heart, | CNBP (Type 2) and DMPK (Type 1) |
| Type 2) | | endocrine | |
| Neoplasia | | | PTEN; ATM; ATR; EGFR; ERBB2; |
| | | | ERBB3; ERBB4; |
| | | | Notch1; Notch2; Notch3; Notch4; |
| | | | AKT; AKT2; AKT3; HIF; |
| | | | HIF1a; HIF3a; Met; HRG; Bcl2; |
| | | | PPAR alpha; PPAR |
| | | | gamma; WT1 (Wilms Tumor); FGF |
| | | | Receptor Family |
| | | | members (5 members: 1, 2, 3, 4, 5); |
| | | | CDKN2a; APC; RB |
| | | | (retinoblastoma); MEN1; VHL; |
| | | | BRCA1; BRCA2; AR |
| | | | (Androgen Receptor); TSG101; IGF; |
| | | | IGF Receptor; Igf1 (4 |
| | | | variants); Igf2 (3 variants); Igf 1 |
| | | | Receptor; Igf 2 Receptor; |
| | | | Bax; Bcl2; caspases family (9 |
| | | | members: |
| | | | 1, 2, 3, 4, 6, 7, 8, 9, 12); Kras; Apc |
| Neurofibromatosis (NF) (NF1, | brain, spinal | | NF1, NF2 |
| formerly Recklinghausen's NF, | cord, nerves, | | |
| and NF2) | and skin | | |
| Niemann-Pick Lipidosis (Types | Lysosomal | Various- where | Types A and B: SMPD1; Type C: |
| A, B, and C) | Storage Disease | sphingomyelin | NPC1 or NPC2 |
| | | accumulates, | |
| | | particularly | |
| | | spleen, liver, | |
| | | blood, CNS | |
| Noonan Syndrome | Various - | | PTPN11, SOS1, RAF1 and KRAS |
| | musculoskeletal, | | |
| | heart, eyes, | | |
| | reproductive | | |
| | organs, blood | | |
| Norrie Disease or X-linked | eye | | NDP |
| Familial Exudative | | | |
| Vitreoretinopathy | | | |
| North Carolina Macular | eye | | MCDR1 |
| Dystrophy | | | |
| Osteogenesis imperfecta (OI) | bones, | | COL1A1, COL1A2, CRTAP, P3H |
| (Types I, II, III, IV, V, VI, VII) | musculoskeletal | | |
| Osteopetrosis | bones | | LRP5, BMND1, LRP7, LR3, OPPG, |
| | | | VBCH2, CLCN7, CLC7, OPTA2, |
| | | | OSTM1, GL, TCIRG1, TIRC7, |
| | | | OC116, OPTB1 |
| Patau's Syndrome | Brain, heart, | | Additional copy of chromosome 13 |
| (Trisomy 13) | skeletal system | | |
| Parkinson's disease (PD) | Brain, nervous | | SNCA (PARK1), UCHL1 (PARK 5), |
| | system | | and LRRK2 (PARK8), (PARK3), |
| | | | PARK2, PARK4, PARK7 (PARK7), |
| | | | PINK1 (PARK6); x-Synuclein, DJ-1, |
| | | | Parkin, NR4A2, NURR1, NOT, |
| | | | TINUR, SNCAIP, TBP, SCA17, |
| | | | NCAP, PRKN, PDJ, DBH, NDUFV2 |
| Pattern Dystrophy of the RPE | eye | | RDS/peripherin |
| Phenylketonuria (PKU) | Metabolism | Various due to | PAH, PKU1, QDPR, DHPR, PTS |
| | disorder | build-up of | |
| | | phenylalanine, | |
| | | phenyl ketones | |
| | | in tissues and | |
| | | CNS | |
| Polycystic kidney and hepatic | Kidney, liver | | FCYT, PKHD1, ARPKD, PKD1, |
| disease | | | PKD2, PKD4, PKDTS, PRKCSH, |
| | | | G19P1, PCLD, SEC63 |
| Pompe's Disease | Glycogen | Various - heart, | GAA |
| | storage disease | liver, spleen | |
| Porphyria (actually refers to a | Various- | | ALAD, ALAS2, CPOX, FECH, |
| group of different diseases all | wherever heme | | HMBS, PPOX, UROD, or UROS |
| having a specific heme | precursors | | |
| production process abnormality) | accumulate | | |
| posterior polymorphous corneal | eyes | | TCF4; COL8A2 |
| dystrophy | | | |
| Primary Hyperoxaluria (e.g. type | Various - eyes, | | LDHA (lactate dehydrogenase A) and |
| 1) | heart, kidneys, | | hydroxyacid oxidase 1 (HAO1) |
| | skeletal system | | |
| Primary Open Angle Glaucoma | eyes | | MYOC |
| (POAG) | | | |
| Primary sclerosing cholangitis | Liver, | | TCF4; COL8A2 |
| | gallbladder | | |
| Progeria (also called Hutchinson- | All | | LMNA |
| Gilford progeria syndrome) | | | |
| Prader-Willi Syndrome | Musculoskeletal | | Deletion of region of short arm of |
| | system, brain, | | chromosome 15, including UBE3A |
| | reproductive | | |
| | and endocrine | | |
| | system | | |
| Prostate Cancer | prostate | | HOXB13, MSMB, GPRC6A, TP53 |
| Pyruvate Dehydrogenase | Brain, nervous | | PDHA1 |
| Deficiency | system | | |
| Kidney/Renal carcinoma | kidney | | RLIP76, VEGF |
| Rett Syndrome | Brain | | MECP2, RTT, PPMX, MRX16, |
| | | | MRX79, CDKL5, STK9, MECP2, |
| | | | RTT, PPMX, MRX16, MRX79, x- |
| | | | Synuclein, DJ-1 |
| Retinitis pigmentosa (RP) | eye | | ADIPOR1, ABCA4, AGBL5, |
| | | | ARHGEF18, ARL2BP, ARL3, ARL6, |
| | | | BEST1, BBS1, BBS2, C2ORF71, |
| | | | C8ORF37, CA4, CERKL, CLRN1, |
| | | | CNGA1, CMGB1, CRB1, CRX, |
| | | | CYP4V2, DHDDS, DHX38, EMC1, |
| | | | EYS, FAM161A, FSCN2, GPR125, |
| | | | GUCA1B, HK1, HPRPF3, HGSNAT, |
| | | | IDH3B, IMPDH1, IMPG2, IFT140, |
| | | | IFT172, KLHL7, KIAA1549, KIZ, |
| | | | LRAT, MAK, MERTK, MVK, NEK2, |
| | | | NUROD1, NR2E3, NRL, OFD1, |
| | | | PDE6A, PDE6B, PDE6G, POMGNT1, |
| | | | PRCD, PROM1, PRPF3, PRPF4, |
| | | | PRPF6, PRPF8, PRPF31, PRPH2, |
| | | | RPB3, RDH12, REEP6, RP39, RGR, |
| | | | RHO, RLBP1, ROM1, RP1, RP1L1, |
| | | | RPY, RP2, RP9, RPE65, RPGR, |
| | | | SAMD11, SAG, SEMA4A, SLC7A14, |
| | | | SNRNP200, SPP2, SPATA7, TRNT1, |
| | | | TOPORS, TTC8, TULP1, USH2A, |
| | | | ZFN408, ZNF513, see also |
| | | | 20120204282 |
| Scheie syndrome (also known as | Various- liver, | | IDUA, α-L-iduronidase |
| mucopolysaccharidosis type I | spleen, eye, | | |
| S(MPS I-S)) | joint, heart, | | |
| | brain, skeletal | | |
| Schizophrenia | Brain | | Neuregulin1 (Nrg1); Erb4 (receptor for |
| | | | Neuregulin); |
| | | | Complexin1 (Cplx1); Tph1 |
| | | | Tryptophan hydroxylase; Tph2 |
| | | | Tryptophan hydroxylase 2; Neurexin |
| | | | 1; GSK3; GSK3a; |
| | | | GSK3b; 5-HTT (Slc6a4); COMT; |
| | | | DRD (Drd1a); SLC6A3; DAOA; |
| | | | DTNBP1; Dao (Dao1); TCF4; |
| | | | COL8A2 |
| Secretase Related Disorders | Various | | APH-1 (alpha and beta); PSEN1; |
| | | | NCSTN; PEN-2; Nos1, Parp1, Nat1, |
| | | | Nat2, CTSB, APP, APH1B, PSEN2, |
| | | | PSENEN, BACE1, ITM2B, CTSD, |
| | | | NOTCH1, TNF, INS, DYT10, |
| | | | ADAM17, APOE, ACE, STN, TP53, |
| | | | IL6, NGFR, IL1B, ACHE, CTNNB1, |
| | | | IGF1, IFNG, NRG1, CASP3, MAPK1, |
| | | | CDH1, APBB1, HMGCR, CREB1, |
| | | | PTGS2, HES1, CAT, TGFB1, ENO2, |
| | | | ERBB4, TRAPPC10, MAOB, NGF, |
| | | | MMP12, JAG1, CD40LG, PPARG, |
| | | | FGF2, LRP1, NOTCH4, MAPK8, |
| | | | PREP, NOTCH3, PRNP, CTSG, EGF, |
| | | | REN, CD44, SELP, GHR, ADCYAP1, |
| | | | INSR, GFAP, MMP3, MAPK10, SP1, |
| | | | MYC, CTSE, PPARA, JUN, TIMP1, |
| | | | IL5, IL1A, MMP9, HTR4, HSPG2, |
| | | | KRAS, CYCS, SMG1, IL1R1, |
| | | | PROK1, MAPK3, NTRK1, IL13, |
| | | | MME, TKT, CXCR2, CHRM1, |
| | | | ATXN1, PAWR, NOTCJ2, M6PR, |
| | | | CYP46A1, CSNK1D, MAPK14, |
| | | | PRG2, PRKCA, L1 CAM, CD40, |
| | | | NR1I2, JAG2, CTNND1, CMA1, |
| | | | SORT1, DLK1, THEM4, JUP, CD46, |
| | | | CCL11, CAV3, RNASE3, HSPA8, |
| | | | CASP9, CYP3A4, CCR3, TFAP2A, |
| | | | SCP2, CDK4, JOF1A, TCF7L2, |
| | | | B3GALTL, MDM2, RELA, CASP7, |
| | | | IDE, FANP4, CASK, ADCYAP1R1, |
| | | | ATF4, PDGFA, C21ORF33, SCG5, |
| | | | RMF123, NKFB1, ERBB2, CAV1, |
| | | | MMP7, TGFA, RXRA, STX1A, |
| | | | PSMC4, P2RY2, TNFRSF21, DLG1, |
| | | | NUMBL, SPN, PLSCR1, UBQLN2, |
| | | | UBQLN1, PCSK7, SPON1, SILV, |
| | | | QPCT, HESS, GCC1 |
| Selective IgA Deficiency | Immune system | | Type 1: MSH5; Type 2: TNFRSF13B |
| Severe Combined | Immune system | | JAK3, JAKL, DCLRE1C, ARTEMIS, |
| Immunodeficiency (SCID) and | | | SCIDA, RAG1, RAG2, ADA, PTPRC, |
| SCID-X1, and ADA-SCID | | | CD45, LCA, IL7R, CD3D, T3D, |
| | | | IL2RG, SCIDX1, SCIDX, IMD4, |
| | | | those identified in US Pat. App. Pub. |
| | | | 20110225664, 20110091441, |
| | | | 20100229252, 20090271881 and |
| | | | 20090222937; |
| Sickle cell disease | blood | | HBB, BCL11A, BCL11Ae, cis- |
| | | | regulatory elements of the B-globin |
| | | | locus, HBG 1/2 promoter, those |
| | | | described in WO2015148863, WO |
| | | | 2013/126794, |
| | | | US Pat. Pub. 20110182867 |
| Sly Syndrome (aka MPS VII) | | | GUSB |
| Spinocerebellar Ataxias (SCA | | | ATXN1, ATXN2, ATX3 |
| types 1, 2, 3, 6, 7, 8, 12 and 17) | | | |
| Sorsby Fundus Dystrophy | eye | | TIMP3 |
| Stargardt disease | eye | | ABCR, ELOVL4, ABCA4, PROM1 |
| Tay-Sachs Disease | Lysosomal | Various - CNS, | HEX-A |
| | Storage disease | brain, eye | |
| Thalassemia (Alpha, Beta, Delta) | blood | | HBA1, HBA2 (Alpha), HBB (Beta), |
| | | | HBB and HBD (delta), LCRB, |
| | | | BCL11A, BCL11Ae, cis-regulatory |
| | | | elements of the B-globin locus, HBG |
| | | | 1/2 promoter, those described in |
| | | | WO2015148860, US Pat. Pub. |
| | | | 20110182867, 2015/148860 |
| Thymic Aplasia (DiGeorge | Immune system, | | deletion of 30 to 40 genes in the |
| Syndrome; 22q11.2 deletion | thymus | | middle of chromosome 22 at |
| syndrome) | | | a location known as 22q11.2, including |
| | | | TBX1, DGCR8 |
| Transthyretin amyloidosis | liver | | TTR (transthyretin) |
| (ATTR) | | | |
| trimethylaminuria | Metabolism | | FMO3 |
| | disease | | |
| Trinucleotide Repeat Disorders | Various | | HTT; SBMA/SMAX1/AR; |
| (generally) | | | FXN/X25 ATX3; |
| | | | ATXN1; ATXN2; |
| | | | DMPK; Atrophin-1 and Atn1 |
| | | | (DRPLA Dx); CBP (Creb-BP - global |
| | | | instability); VLDLR; Atxn7; Atxn10; |
| | | | FEN1, TNRC6A, PABPN1, JPH3, |
| | | | MED15, ATXN1, ATXN3, TBP, |
| | | | CACNA1A, ATXN80S, PPP2R2B, |
| | | | ATXN7, TNRC6B, TNRC6C, CELF3, |
| | | | MAB21L1, MSH2, TMEM185A, |
| | | | SIX5, CNPY3, RAXE, GNB2, RPL14, |
| | | | ATXN8, ISR, TTR, EP400, GIGYF2, |
| | | | OGG1, STC1, CNDP1, C10ORF2, |
| | | | MAML3, DKC1, PAXIP1, CASK, |
| | | | MAPT, SP1, POLG, AFF2, THBS1, |
| | | | TP53, ESR1, CGGBP1, ABT1, KLK3, |
| | | | PRNP, JUN, KCNN3, BAX, FRAXA, |
| | | | KBTBD10, MBNL1, RAD51, |
| | | | NCOA3, ERDA1, TSC1, COMP, |
| | | | GGLC, RRAD, MSH3, DRD2, CD44, |
| | | | CTCF, CCND1, CLSPN, MEF2A, |
| | | | PTPRU, GAPDH, TRIM22, WT1, |
| | | | AHR, GPX1, TPMT, NDP, ARX, |
| | | | TYR, EGR1, UNG, NUMBL, FABP2, |
| | | | EN2, CRYGC, SRP14, CRYGB, |
| | | | PDCD1, HOXA1, ATXN2L, PMS2, |
| | | | GLA, CBL, FTH1, IL12RB2, OTX2, |
| | | | HOXA5, POLG2, DLX2, AHRR, |
| | | | MANF, RMEM158, see also |
| | | | 20110016540 |
| Turner's Syndrome (XO) | Various - | | Monosomy X |
| | reproductive | | |
| | organs, and sex | | |
| | characteristics, | | |
| | vasculature | | |
| Tuberous Sclerosis | CNS, heart, | | TSC1, TSC2 |
| | kidneys | | |
| Usher syndrome (Types I, II, and | Ears, eyes | | ABHD12, CDH23, CIB2, CLRN1, |
| III) | | | DFNB31, GPR98, HARS, MYO7A, |
| | | | PCDH15, USH1C, USH1G, USH2A, |
| | | | USH11A, those described in |
| | | | WO2015134812A1 |
| Velocardiofacial syndrome (aka | Various - | | Many genes are deleted, COM, TBX1, |
| 22q11.2 deletion syndrome, | skeletal, heart, | | and other are associated with |
| DiGeorge syndrome, conotruncal | kidney, immune | | symptoms |
| anomaly face syndrome (CTAF), | system, brain | | |
| autosomal dominant Opitz G/BB | | | |
| syndrome or Cayler cardiofacial | | | |
| syndrome) | | | |
| Von Gierke's Disease (Glycogen | Glycogen | Various - liver, | G6PC and SLC37A4 |
| Storage Disease type I) | Storage disease | kidney | |
| Von Hippel-Lindau Syndrome | Various - cell | CNS, Kidney, | VHL |
| | growth | Eye, visceral | |
| | regulation | organs | |
| | disorder | | |
| Von Willebrand Disease (Types | blood | | VWF |
| I, II and III) | | | |
| Wilson Disease | Various - | Liver, brains, | ATP7B |
| | Copper Storage | eyes, other | |
| | Disease | tissues where | |
| | | copper builds up | |
| Wiskott-Aldrich Syndrome | Immune System | | WAS |
| Xeroderma Pigmentosum | Skin | Nervous system | POLH |
| XXX Syndrome | Endocrine, brain | | X chromosome trisomy |

[0660] In some embodiments, the compositions, systems, or components thereof can be used treat or prevent a disease in a subject by modifying one or more genes associated with one or more cellular functions, such as any one or more of those in Table 5. In some embodiments, the disease is a genetic disease or disorder. In some of embodiments, the composition, system, or component thereof can modify one or more genes or polynucleotides associated with one or more genetic diseases such as any set forth in Table 5.

TABLE 5
Exemplary Genes controlling Cellular Functions

| CELLULAR FUNCTION | GENES |
|---|---|
| PI3K/AKT Signaling | PRKCE; ITGAM; ITGA5; IRAK1; PRKAA2; EIF2AK2; |
| | PTEN; EIF4E; PRKCZ; GRK6; MAPK1; TSC1; PLK1; |
| | AKT2; IKBKB; PIK3CA; CDK8; CDKN1B; NFKB2; BCL2; |
| | PIK3CB; PPP2R1A; MAPK8; BCL2L1; MAPK3; TSC2; |
| | ITGA1; KRAS; EIF4EBP1; RELA; PRKCD; NOS3; |
| | PRKAA1; MAPK9; CDK2; PPP2CA; PIM1; ITGB7; |
| | YWHAZ; ILK; TP53; RAF1; IKBKG; RELB; DYRK1A; |
| | CDKN1A; ITGB1; MAP2K2; JAK1; AKT1; JAK2; PIK3R1; |
| | CHUK; PDPK1; PPP2R5C; CTNNB1; MAP2K1; NFKB1; |
| | PAK3; ITGB3; CCND1; GSK3A; FRAP1; SFN; ITGA2; |
| | TTK; CSNK1A1; BRAF; GSK3B; AKT3; FOXO1; SGK; |
| | HSP90AA1; RPS6KB1 |
| ERK/MAPK Signaling | PRKCE; ITGAM; ITGA5; HSPB1; IRAK1; PRKAA2; |
| | EIF2AK2; RAC1; RAP1A; TLN1; EIF4E; ELK1; GRK6; |
| | MAPK1; RAC2; PLK1; AKT2; PIK3CA; CDK8; CREB1; |
| | PRKCI; PTK2; FOS; RPS6KA4; PIK3CB; PPP2R1A; |
| | PIK3C3; MAPK8; MAPK3; ITGA1; ETS1; KRAS; MYCN; |
| | EIF4EBP1; PPARG; PRKCD; PRKAA1; MAPK9; SRC; |
| | CDK2; PPP2CA; PIM1; PIK3C2A; ITGB7; YWHAZ; |
| | PPP1CC; KSR1; PXN; RAF1; FYN; DYRK1A; ITGB1; |
| | MAP2K2; PAK4; PIK3R1; STAT3; PPP2R5C; MAP2K1; |
| | PAK3; ITGB3; ESR1; ITGA2; MYC; TTK; CSNK1A1; |
| | CRKL; BRAF; ATF4; PRKCA; SRF; STAT1; SGK |
| Glucocorticoid Receptor | RAC1; TAF4B; EP300; SMAD2; TRAF6; PCAF; ELK1; |
| Signaling | MAPK1; SMAD3; AKT2; IKBKB; NCOR2; UBE2I; |
| | PIK3CA; CREB1; FOS; HSPA5; NFKB2; BCL2; |
| | MAP3K14; STAT5B; PIK3CB; PIK3C3; MAPK8; BCL2L1; |
| | MAPK3; TSC22D3; MAPK10; NRIP1; KRAS; MAPK13; |
| | RELA; STAT5A; MAPK9; NOS2A; PBX1; NR3C1; |
| | PIK3C2A; CDKN1C; TRAF2; SERPINE1; NCOA3; |
| | MAPK14; TNF; RAF1; IKBKG; MAP3K7; CREBBP; |
| | CDKN1A; MAP2K2; JAK1; IL8; NCOA2; AKT1; JAK2; |
| | PIK3R1; CHUK; STAT3; MAP2K1; NFKB1; TGFBR1; |
| | ESR1; SMAD4; CEBPB; JUN; AR; AKT3; CCL2; MMP1; |
| | STAT1; IL6; HSP90AA1 |
| Axonal Guidance Signaling | PRKCE; ITGAM; ROCK1; ITGA5; CXCR4; ADAM12; |
| | IGF1; RAC1; RAP1A; EIF4E; PRKCZ; NRP1; NTRK2; |
| | ARHGEF7; SMO; ROCK2; MAPK1; PGF; RAC2; |
| | PTPN11; GNAS; AKT2; PIK3CA; ERBB2; PRKCI; PTK2; |
| | CFL1; GNAQ; PIK3CB; CXCL12; PIK3C3; WNT11; |
| | PRKD1; GNB2L1; ABL1; MAPK3; ITGA1; KRAS; RHOA; |
| | PRKCD; PIK3C2A; ITGB7; GLI2; PXN; VASP; RAF1; |
| | FYN; ITGB1; MAP2K2; PAK4; ADAM17; AKT1; PIK3R1; |
| | GLI1; WNT5A; ADAM10; MAP2K1; PAK3; ITGB3; |
| | CDC42; VEGFA; ITGA2; EPHA8; CRKL; RND1; GSK3B; |
| | AKT3; PRKCA |
| Ephrin Receptor Signaling | PRKCE; ITGAM; ROCK1; ITGA5; CXCR4; IRAK1; |
| Actin Cytoskeleton | PRKAA2; EIF2AK2; RAC1; RAP1A; GRK6; ROCK2; |
| Signaling | MAPK1; PGF; RAC2; PTPN11; GNAS; PLK1; AKT2; |
| | DOK1; CDK8; CREB1; PTK2; CFL1; GNAQ; MAP3K14; |
| | CXCL12; MAPK8; GNB2L1; ABL1; MAPK3; ITGA1; |
| | KRAS; RHOA; PRKCD; PRKAA1; MAPK9; SRC; CDK2; |
| | PIM1; ITGB7; PXN; RAF1; FYN; DYRK1A; ITGB1; |
| | MAP2K2; PAK4; AKT1; JAK2; STAT3; ADAM10; |
| | MAP2K1; PAK3; ITGB3; CDC42; VEGFA; ITGA2; |
| | EPHA8; TTK; CSNK1A1; CRKL; BRAF; PTPN13; ATF4; |
| | AKT3; SGK |
| | ACTN4; PRKCE; ITGAM; ROCK1; ITGA5; IRAK1; |
| | PRKAA2; EIF2AK2; RAC1; INS; ARHGEF7; GRK6; |
| | ROCK2; MAPK1; RAC2; PLK1; AKT2; PIK3CA; CDK8; |
| | PTK2; CFL1; PIK3CB; MYH9; DIAPH1; PIK3C3; MAPK8; |
| | F2R; MAPK3; SLC9A1; ITGA1; KRAS; RHOA; PRKCD; |
| | PRKAA1; MAPK9; CDK2; PIM1; PIK3C2A; ITGB7; |
| | PPP1CC; PXN; VIL2; RAF1; GSN; DYRK1A; ITGB1; |
| | MAP2K2; PAK4; PIP5K1A; PIK3R1; MAP2K1; PAK3; |
| | ITGB3; CDC42; APC; ITGA2; TTK; CSNK1A1; CRKL; |
| | BRAF; VAV3; SGK |
| Huntington's Disease | PRKCE; IGF1; EP300; RCOR1; PRKCZ; HDAC4; TGM2; |
| Signaling | MAPK1; CAPNS1; AKT2; EGFR; NCOR2; SP1; CAPN2; |
| | PIK3CA; HDAC5; CREB1; PRKCI; HSPA5; REST; |
| | GNAQ; PIK3CB; PIK3C3; MAPK8; IGF1R; PRKD1; |
| | GNB2L1; BCL2L1; CAPN1; MAPK3; CASP8; HDAC2; |
| | HDACTA; PRKCD; HDAC11; MAPK9; HDAC9; PIK3C2A; |
| | HDAC3; TP53; CASP9; CREBBP; AKT1; PIK3R1; |
| | PDPK1; CASP1; APAF1; FRAP1; CASP2; JUN; BAX; |
| | ATF4; AKT3; PRKCA; CLTC; SGK; HDAC6; CASP3 |
| Apoptosis Signaling | PRKCE; ROCK1; BID; IRAK1; PRKAA2; EIF2AK2; BAK1; |
| | BIRC4; GRK6; MAPK1; CAPNS1; PLK1; AKT2; IKBKB; |
| | CAPN2; CDK8; FAS; NFKB2; BCL2; MAP3K14; MAPK8; |
| | BCL2L1; CAPN1; MAPK3; CASP8; KRAS; RELA; |
| | PRKCD; PRKAA1; MAPK9; CDK2; PIM1; TP53; TNF; |
| | RAF1; IKBKG; RELB; CASP9; DYRK1A; MAP2K2; |
| | CHUK; APAF1; MAP2K1; NFKB1; PAK3; LMNA; CASP2; |
| | BIRC2; TTK; CSNK1A1; BRAF; BAX; PRKCA; SGK; |
| | CASP3; BIRC3; PARP1 |
| B Cell Receptor Signaling | RAC1; PTEN; LYN; ELK1; MAPK1; RAC2; PTPN11; |
| | AKT2; IKBKB; PIK3CA; CREB1; SYK; NFKB2; CAMK2A; |
| | MAP3K14; PIK3CB; PIK3C3; MAPK8; BCL2L1; ABL1; |
| | MAPK3; ETS1; KRAS; MAPK13; RELA; PTPN6; MAPK9; |
| | EGR1; PIK3C2A; BTK; MAPK14; RAF1; IKBKG; RELB; |
| | MAP3K7; MAP2K2; AKT1; PIK3R1; CHUK; MAP2K1; |
| | NFKB1; CDC42; GSK3A; FRAP1; BCL6; BCL10; JUN; |
| | GSK3B; ATF4; AKT3; VAV3; RPS6KB1 |
| Leukocyte Extravasation | ACTN4; CD44; PRKCE; ITGAM; ROCK1; CXCR4; CYBA; |
| Signaling | RAC1; RAP1A; PRKCZ; ROCK2; RAC2; PTPN11; |
| | MMP14; PIK3CA; PRKCI; PTK2; PIK3CB; CXCL12; |
| | PIK3C3; MAPK8; PRKD1; ABL1; MAPK10; CYBB; |
| | MAPK13; RHOA; PRKCD; MAPK9; SRC; PIK3C2A; BTK; |
| | MAPK14; NOX1; PXN; VIL2; VASP; ITGB1; MAP2K2; |
| | CTNND1; PIK3R1; CTNNB1; CLDN1; CDC42; F11R; ITK; |
| | CRKL; VAV3; CTTN; PRKCA; MMP1; MMP9 |
| Integrin Signaling | ACTN4; ITGAM; ROCK1; ITGA5; RAC1; PTEN; RAP1A; |
| | TLN1; ARHGEF7; MAPK1; RAC2; CAPNS1; AKT2; |
| | CAPN2; PIK3CA; PTK2; PIK3CB; PIK3C3; MAPK8; |
| | CAV1; CAPN1; ABL1; MAPK3; ITGA1; KRAS; RHOA; |
| | SRC; PIK3C2A; ITGB7; PPP1CC; ILK; PXN; VASP; |
| | RAF1; FYN; ITGB1; MAP2K2; PAK4; AKT1; PIK3R1; |
| | TNK2; MAP2K1; PAK3; ITGB3; CDC42; RND3; ITGA2; |
| | CRKL; BRAF; GSK3B; AKT3 |
| Acute Phase Response | IRAK1; SOD2; MYD88; TRAF6; ELK1; MAPK1; PTPN11; |
| Signaling | AKT2; IKBKB; PIK3CA; FOS; NFKB2; MAP3K14; |
| | PIK3CB; MAPK8; RIPK1; MAPK3; IL6ST; KRAS; |
| | MAPK13; IL6R; RELA; SOCS1; MAPK9; FTL; NR3C1; |
| | TRAF2; SERPINE1; MAPK14; TNF; RAF1; PDK1; |
| | IKBKG; RELB; MAP3K7; MAP2K2; AKT1; JAK2; PIK3R1; |
| | CHUK; STAT3; MAP2K1; NFKB1; FRAP1; CEBPB; JUN; |
| | AKT3; IL1R1; IL6 |
| PTEN Signaling | ITGAM; ITGA5; RAC1; PTEN; PRKCZ; BCL2L11; |
| | MAPK1; RAC2; AKT2; EGFR; IKBKB; CBL; PIK3CA; |
| | CDKN1B; PTK2; NFKB2; BCL2; PIK3CB; BCL2L1; |
| | MAPK3; ITGA1; KRAS; ITGB7; ILK; PDGFRB; INSR; |
| | RAF1; IKBKG; CASP9; CDKN1A; ITGB1; MAP2K2; |
| | AKT1; PIK3R1; CHUK; PDGFRA; PDPK1; MAP2K1; |
| | NFKB1; ITGB3; CDC42; CCND1; GSK3A; ITGA2; |
| | GSK3B; AKT3; FOXO1; CASP3; RPS6KB1 |
| p53 Signaling | PTEN; EP300; BBC3; PCAF; FASN; BRCA1; GADD45A; |
| | BIRC5; AKT2; PIK3CA; CHEK1; TP53INP1; BCL2; |
| | PIK3CB; PIK3C3; MAPK8; THBS1; ATR; BCL2L1; E2F1; |
| | PMAIP1; CHEK2; TNFRSF10B; TP73; RB1; HDAC9; |
| | CDK2; PIK3C2A; MAPK14; TP53; LRDD; CDKN1A; |
| | HIPK2; AKT1; PIK3R1; RRM2B; APAF1; CTNNB1; |
| | SIRT1; CCND1; PRKDC; ATM; SFN; CDKN2A; JUN; |
| | SNAI2; GSK3B; BAX; AKT3 |
| Aryl Hydrocarbon Receptor | HSPB1; EP300; FASN; TGM2; RXRA; MAPK1; NQO1; |
| Signaling | NCOR2; SP1; ARNT; CDKN1B; FOS; CHEK1; |
| | SMARCA4; NFKB2; MAPK8; ALDH1A1; ATR; E2F1; |
| | MAPK3; NRIP1; CHEK2; RELA; TP73; GSTP1; RB1; |
| | SRC; CDK2; AHR; NFE2L2; NCOA3; TP53; TNF; |
| | CDKN1A; NCOA2; APAF1; NFKB1; CCND1; ATM; ESR1; |
| | CDKN2A; MYC; JUN; ESR2; BAX; IL6; CYP1B1; |
| | HSP90AA1 |
| Xenobiotic Metabolism | PRKCE; EP300; PRKCZ; RXRA; MAPK1; NQO1; |
| Signaling | NCOR2; PIK3CA; ARNT; PRKCI; NFKB2; CAMK2A; |
| | PIK3CB; PPP2R1A; PIK3C3; MAPK8; PRKD1; |
| | ALDH1A1; MAPK3; NRIP1; KRAS; MAPK13; PRKCD; |
| | GSTP1; MAPK9; NOS2A; ABCB1; AHR; PPP2CA; FTL; |
| | NFE2L2; PIK3C2A; PPARGC1A; MAPK14; TNF; RAF1; |
| | CREBBP; MAP2K2; PIK3R1; PPP2R5C; MAP2K1; |
| | NFKB1; KEAP1; PRKCA; EIF2AK3; IL6; CYP1B1; |
| | HSP90AA1 |
| SAPK/JNK Signaling | PRKCE; IRAK1; PRKAA2; EIF2AK2; RAC1; ELK1; |
| | GRK6; MAPK1; GADD45A; RAC2; PLK1; AKT2; PIK3CA; |
| | FADD; CDK8; PIK3CB; PIK3C3; MAPK8; RIPK1; |
| | GNB2L1; IRS1; MAPK3; MAPK10; DAXX; KRAS; |
| | PRKCD; PRKAA1; MAPK9; CDK2; PIM1; PIK3C2A; |
| | TRAF2; TP53; LCK; MAP3K7; DYRK1A; MAP2K2; |
| | PIK3R1; MAP2K1; PAK3; CDC42; JUN; TTK; CSNK1A1; |
| | CRKL; BRAF; SGK |
| PPAr/RXR Signaling | PRKAA2; EP300; INS; SMAD2; TRAF6; PPARA; FASN; |
| | RXRA; MAPK1; SMAD3; GNAS; IKBKB; NCOR2; |
| | ABCA1; GNAQ; NFKB2; MAP3K14; STAT5B; MAPK8; |
| | IRS1; MAPK3; KRAS; RELA; PRKAA1; PPARGC1A; |
| | NCOA3; MAPK14; INSR; RAF1; IKBKG; RELB; MAP3K7; |
| | CREBBP; MAP2K2; JAK2; CHUK; MAP2K1; NFKB1; |
| | TGFBR1; SMAD4; JUN; IL1R1; PRKCA; IL6; HSP90AA1; |
| | ADIPOQ |
| NF-KB Signaling | IRAK1; EIF2AK2; EP300; INS; MYD88; PRKCZ; TRAF6; |
| | TBK1; AKT2; EGFR; IKBKB; PIK3CA; BTRC; NFKB2; |
| | MAP3K14; PIK3CB; PIK3C3; MAPK8; RIPK1; HDAC2; |
| | KRAS; RELA; PIK3C2A; TRAF2; TLR4; PDGFRB; TNF; |
| | INSR; LCK; IKBKG; RELB; MAP3K7; CREBBP; AKT1; |
| | PIK3R1; CHUK; PDGFRA; NFKB1; TLR2; BCL10; |
| | GSK3B; AKT3; TNFAIP3; IL1R1 |
| Neuregulin Signaling | ERBB4; PRKCE; ITGAM; ITGA5; PTEN; PRKCZ; ELK1; |
| | MAPK1; PTPN11; AKT2; EGFR; ERBB2; PRKCI; |
| | CDKN1B; STAT5B; PRKD1; MAPK3; ITGA1; KRAS; |
| | PRKCD; STAT5A; SRC; ITGB7; RAF1; ITGB1; MAP2K2; |
| | ADAM17; AKT1; PIK3R1; PDPK1; MAP2K1; ITGB3; |
| | EREG; FRAP1; PSEN1; ITGA2; MYC; NRG1; CRKL; |
| | AKT3; PRKCA; HSP90AA1; RPS6KB1 |
| Wnt & Beta catenin | CD44; EP300; LRP6; DVL3; CSNK1E; GJA1; SMO; |
| Signaling | AKT2; PIN1; CDH1; BTRC; GNAQ; MARK2; PPP2R1A; |
| | WNT11; SRC; DKK1; PPP2CA; SOX6; SFRP2; ILK; |
| | LEF1; SOX9; TP53; MAP3K7; CREBBP; TCF7L2; AKT1; |
| | PPP2R5C; WNT5A; LRP5; CTNNB1; TGFBR1; CCND1; |
| | GSK3A; DVL1; APC; CDKN2A; MYC; CSNK1A1; GSK3B; |
| | AKT3; SOX2 |
| Insulin Receptor Signaling | PTEN; INS; EIF4E; PTPN1; PRKCZ; MAPK1; TSC1; |
| | PTPN11; AKT2; CBL; PIK3CA; PRKCI; PIK3CB; PIK3C3; |
| | MAPK8; IRS1; MAPK3; TSC2; KRAS; EIF4EBP1; |
| | SLC2A4; PIK3C2A; PPP1CC; INSR; RAF1; FYN; |
| | MAP2K2; JAK1; AKT1; JAK2; PIK3R1; PDPK1; MAP2K1; |
| | GSK3A; FRAP1; CRKL; GSK3B; AKT3; FOXO1; SGK; |
| | RPS6KB1 |
| IL-6 Signaling | HSPB1; TRAF6; MAPKAPK2; ELK1; MAPK1; PTPN11; |
| | IKBKB; FOS; NFKB2; MAP3K14; MAPK8; MAPK3; |
| | MAPK10; IL6ST; KRAS; MAPK13; IL6R; RELA; SOCS1; |
| | MAPK9; ABCB1; TRAF2; MAPK14; TNF; RAF1; IKBKG; |
| | RELB; MAP3K7; MAP2K2; IL8; JAK2; CHUK; STAT3; |
| | MAP2K1; NFKB1; CEBPB; JUN; IL1R1; SRF; IL6 |
| Hepatic Cholestasis | PRKCE; IRAK1; INS; MYD88; PRKCZ; TRAF6; PPARA; |
| | RXRA; IKBKB; PRKCI; NFKB2; MAP3K14; MAPK8; |
| | PRKD1; MAPK10; RELA; PRKCD; MAPK9; ABCB1; |
| | TRAF2; TLR4; TNF; INSR; IKBKG; RELB; MAP3K7; IL8; |
| | CHUK; NR1H2; TJP2; NFKB1; ESR1; SREBF1; FGFR4; |
| | JUN; IL1R1; PRKCA; IL6 |
| IGF-1 Signaling | IGF1; PRKCZ; ELK1; MAPK1; PTPN11; NEDD4; AKT2; |
| | PIK3CA; PRKCI; PTK2; FOS; PIK3CB; PIK3C3; MAPK8; |
| | IGF1R; IRS1; MAPK3; IGFBP7; KRAS; PIK3C2A; |
| | YWHAZ; PXN; RAF1; CASP9; MAP2K2; AKT1; PIK3R1; |
| | PDPK1; MAP2K1; IGFBP2; SFN; JUN; CYR61; AKT3; |
| | FOXO1; SRF; CTGF; RPS6KB1 |
| NRF2-mediated Oxidative | PRKCE; EP300; SOD2; PRKCZ; MAPK1; SQSTM1; |
| Stress Response | NQO1; PIK3CA; PRKCI; FOS; PIK3CB; PIK3C3; MAPK8; |
| | PRKD1; MAPK3; KRAS; PRKCD; GSTP1; MAPK9; FTL; |
| | NFE2L2; PIK3C2A; MAPK14; RAF1; MAP3K7; CREBBP; |
| | MAP2K2; AKT1; PIK3R1; MAP2K1; PPIB; JUN; KEAP1; |
| | GSK3B; ATF4; PRKCA; EIF2AK3; HSP90AA1 |
| Hepatic Fibrosis/Hepatic | EDN1; IGF1; KDR; FLT1; SMAD2; FGFR1; MET; PGF; |
| Stellate Cell Activation | SMAD3; EGFR; FAS; CSF1; NFKB2; BCL2; MYH9; |
| | IGF1R; IL6R; RELA; TLR4; PDGFRB; TNF; RELB; IL8; |
| | PDGFRA; NFKB1; TGFBR1; SMAD4; VEGFA; BAX; |
| | IL1R1; CCL2; HGF; MMP1; STAT1; IL6; CTGF; MMP9 |
| PPAR Signaling | EP300; INS; TRAF6; PPARA; RXRA; MAPK1; IKBKB; |
| | NCOR2; FOS; NFKB2; MAP3K14; STAT5B; MAPK3; |
| | NRIP1; KRAS; PPARG; RELA; STATSA; TRAF2; |
| | PPARGC1A; PDGFRB; TNF; INSR; RAF1; IKBKG; |
| | RELB; MAP3K7; CREBBP; MAP2K2; CHUK; PDGFRA; |
| | MAP2K1; NFKB1; JUN; IL1R1; HSP90AA1 |
| Fc Epsilon RI Signaling | PRKCE; RAC1; PRKCZ; LYN; MAPK1; RAC2; PTPN11; |
| | AKT2; PIK3CA; SYK; PRKCI; PIK3CB; PIK3C3; MAPK8; |
| | PRKD1; MAPK3; MAPK 10; KRAS; MAPK13; PRKCD; |
| | MAPK9; PIK3C2A; BTK; MAPK14; TNF; RAF1; FYN; |
| | MAP2K2; AKT1; PIK3R1; PDPK1; MAP2K1; AKT3; |
| | VAV3; PRKCA |
| G-Protein Coupled | PRKCE; RAP1A; RGS16; MAPK1; GNAS; AKT2; IKBKB; |
| Receptor Signaling | PIK3CA; CREB1; GNAQ; NFKB2; CAMK2A; PIK3CB; |
| | PIK3C3; MAPK3; KRAS; RELA; SRC; PIK3C2A; RAF1; |
| | IKBKG; RELB; FYN; MAP2K2; AKT1; PIK3R1; CHUK; |
| | PDPK1; STAT3; MAP2K1; NFKB1; BRAF; ATF4; AKT3; |
| | PRKCA |
| Inositol Phosphate | PRKCE; IRAK1; PRKAA2; EIF2AK2; PTEN; GRK6; |
| Metabolism | MAPK1; PLK1; AKT2; PIK3CA; CDK8; PIK3CB; PIK3C3; |
| | MAPK8; MAPK3; PRKCD; PRKAA1; MAPK9; CDK2; |
| | PIM1; PIK3C2A; DYRK1A; MAP2K2; PIP5K1A; PIK3R1; |
| | MAP2K1; PAK3; ATM; TTK; CSNK1A1; BRAF; SGK |
| PDGF Signaling | EIF2AK2; ELK1; ABL2; MAPK1; PIK3CA; FOS; PIK3CB; |
| | PIK3C3; MAPK8; CAV1; ABL1; MAPK3; KRAS; SRC; |
| | PIK3C2A; PDGFRB; RAF1; MAP2K2; JAK1; JAK2; |
| | PIK3R1; PDGFRA; STAT3; SPHK1; MAP2K1; MYC; |
| | JUN; CRKL; PRKCA; SRF; STAT1; SPHK2 |
| VEGF Signaling | ACTN4; ROCK1; KDR; FLT1; ROCK2; MAPK1; PGF; |
| | AKT2; PIK3CA; ARNT; PTK2; BCL2; PIK3CB; PIK3C3; |
| | BCL2L1; MAPK3; KRAS; HIF1A; NOS3; PIK3C2A; PXN; |
| | RAF1; MAP2K2; ELAVL1; AKT1; PIK3R1; MAP2K1; SFN; |
| | VEGFA; AKT3; FOXO1; PRKCA |
| Natural Killer Cell Signaling | PRKCE; RAC1; PRKCZ; MAPK1; RAC2; PTPN11; |
| | KIR2DL3; AKT2; PIK3CA; SYK; PRKCI; PIK3CB; |
| | PIK3C3; PRKD1; MAPK3; KRAS; PRKCD; PTPN6; |
| | PIK3C2A; LCK; RAF1; FYN; MAP2K2; PAK4; AKT1; |
| | PIK3R1; MAP2K1; PAK3; AKT3; VAV3; PRKCA |
| Cell Cycle: G1/S | HDAC4; SMAD3; SUV39H1; HDAC5; CDKN1B; BTRC; |
| Checkpoint Regulation | ATR; ABL1; E2F1; HDAC2; HDAC7A; RB1; HDAC11; |
| | HDAC9; CDK2; E2F2; HDAC3; TP53; CDKN1A; CCND1; |
| | E2F4; ATM; RBL2; SMAD4; CDKN2A; MYC; NRG1; |
| | GSK3B; RBL1; HDAC6 |
| T Cell Receptor Signaling | RAC1; ELK1; MAPK1; IKBKB; CBL; PIK3CA; FOS; |
| | NFKB2; PIK3CB; PIK3C3; MAPK8; MAPK3; KRAS; |
| | RELA; PIK3C2A; BTK; LCK; RAF1; IKBKG; RELB; FYN; |
| | MAP2K2; PIK3R1; CHUK; MAP2K1; NFKB1; ITK; BCL10; |
| | JUN; VAV3 |
| Death Receptor Signaling | CRADD; HSPB1; BID; BIRC4; TBK1; IKBKB; FADD; |
| | FAS; NFKB2; BCL2; MAP3K14; MAPK8; RIPK1; CASP8; |
| | DAXX; TNFRSF10B; RELA; TRAF2; TNF; IKBKG; RELB; |
| | CASP9; CHUK; APAF1; NFKB1; CASP2; BIRC2; CASP3; |
| | BIRC3 |
| FGF Signaling | RAC1; FGFR1; MET; MAPKAPK2; MAPK1; PTPN11; |
| | AKT2; PIK3CA; CREB1; PIK3CB; PIK3C3; MAPK8; |
| | MAPK3; MAPK13; PTPN6; PIK3C2A; MAPK14; RAF1; |
| | AKT1; PIK3R1; STAT3; MAP2K1; FGFR4; CRKL; ATF4; |
| | AKT3; PRKCA; HGF |
| GM-CSF Signaling | LYN; ELK1; MAPK1; PTPN11; AKT2; PIK3CA; CAMK2A; |
| | STAT5B; PIK3CB; PIK3C3; GNB2L1; BCL2L1; MAPK3; |
| | ETS1; KRAS; RUNX1; PIM1; PIK3C2A; RAF1; MAP2K2; |
| | AKT1; JAK2; PIK3R1; STAT3; MAP2K1; CCND1; AKT3; |
| | STAT1 |
| Amyotrophic Lateral | BID; IGF1; RAC1; BIRC4; PGF; CAPNS1; CAPN2; |
| Sclerosis Signaling | PIK3CA; BCL2; PIK3CB; PIK3C3; BCL2L1; CAPN1; |
| | PIK3C2A; TP53; CASP9; PIK3R1; RAB5A; CASP1; |
| | APAF1; VEGFA; BIRC2; BAX; AKT3; CASP3; BIRC3 |
| JAK/Stat Signaling | PTPN1; MAPK1; PTPN11; AKT2; PIK3CA; STAT5B; |
| | PIK3CB; PIK3C3; MAPK3; KRAS; SOCS1; STAT5A; |
| | PTPN6; PIK3C2A; RAF1; CDKN1A; MAP2K2; JAK1; |
| | AKT1; JAK2; PIK3R1; STAT3; MAP2K1; FRAP1; AKT3; |
| | STAT1 |
| Nicotinate and Nicotinamide | PRKCE; IRAK1; PRKAA2; EIF2AK2; GRK6; MAPK1; |
| Metabolism | PLK1; AKT2; CDK8; MAPK8; MAPK3; PRKCD; PRKAA1; |
| | PBEF 1; MAPK9; CDK2; PIM1; DYRK1A; MAP2K2; |
| | MAP2K1; PAK3; NT5E; TTK; CSNK1A1; BRAF; SGK |
| Chemokine Signaling | CXCR4; ROCK2; MAPK1; PTK2; FOS; CFL1; GNAQ; |
| | CAMK2A; CXCL12; MAPK8; MAPK3; KRAS; MAPK13; |
| | RHOA; CCR3; SRC; PPP1CC; MAPK14; NOX1; RAF1; |
| | MAP2K2; MAP2K1; JUN; CCL2; PRKCA |
| IL-2 Signaling | ELK1; MAPK1; PTPN11; AKT2; PIK3CA; SYK; FOS; |
| | STAT5B; PIK3CB; PIK3C3; MAPK8; MAPK3; KRAS; |
| | SOCS1; STAT5A; PIK3C2A; LCK; RAF1; MAP2K2; |
| | JAK1; AKT1; PIK3R1; MAP2K1; JUN; AKT3 |
| Synaptic Long Term | PRKCE; IGF1; PRKCZ; PRDX6; LYN; MAPK1; GNAS; |
| Depression | PRKCI; GNAQ; PPP2R1A; IGF1R; PRKD1; MAPK3; |
| | KRAS; GRN; PRKCD; NOS3; NOS2A; PPP2CA; |
| | YWHAZ; RAF1; MAP2K2; PPP2R5C; MAP2K1; PRKCA |
| Estrogen Receptor | TAF4B; EP300; CARM1; PCAF; MAPK1; NCOR2; |
| Signaling | SMARCA4; MAPK3; NRIP1; KRAS; SRC; NR3C1; |
| | HDAC3; PPARGC1A; RBM9; NCOA3; RAF1; CREBBP; |
| | MAP2K2; NCOA2; MAP2K1; PRKDC; ESR1; ESR2 |
| Protein Ubiquitination | TRAF6; SMURF1; BIRC4; BRCA1; UCHL1; NEDD4; |
| Pathway | CBL; UBE21; BTRC; HSPA5; USP7; USP10; FBXW7; |
| | USP9X; STUB1; USP22; B2M; BIRC2; PARK2; USP8; |
| | USP1; VHL; HSP90AA1; BIRC3 |
| IL-10 Signaling | TRAF6; CCR1; ELK1; IKBKB; SP1; FOS; NFKB2; |
| | MAP3K14; MAPK8; MAPK 13; RELA; MAPK14; TNF; |
| | IKBKG; RELB; MAP3K7; JAK1; CHUK; STAT3; NFKB1; |
| | JUN; IL1R1; IL6 |
| VDR/RXR Activation | PRKCE; EP300; PRKCZ; RXRA; GADD45A; HES1; |
| | NCOR2; SP1; PRKCI; CDKN1B; PRKD1; PRKCD; |
| | RUNX2; KLF4; YY1; NCOA3; CDKN1A; NCOA2; SPP1; |
| | LRP5; CEBPB; FOXO1; PRKCA |
| TGF-beta Signaling | EP300; SMAD2; SMURF1; MAPK1; SMAD3; SMAD1; |
| | FOS; MAPK8; MAPK3; KRAS; MAPK9; RUNX2; |
| | SERPINE1; RAF1; MAP3K7; CREBBP; MAP2K2; |
| | MAP2K1; TGFBR1; SMAD4; JUN; SMAD5 |
| Toll-like Receptor Signaling | IRAK1; EIF2AK2; MYD88; TRAF6; PPARA; ELK1; |
| | IKBKB; FOS; NFKB2; MAP3K14; MAPK8; MAPK13; |
| | RELA; TLR4; MAPK14; IKBKG; RELB; MAP3K7; CHUK; |
| | NFKB1; TLR2; JUN |
| p38 MAPK Signaling | HSPB1; IRAK1; TRAF6; MAPKAPK2; ELK1; FADD; FAS; |
| | CREB1; DDIT3; RPS6KA4; DAXX; MAPK13; TRAF2; |
| | MAPK14; TNF; MAP3K7; TGFBR1; MYC; ATF4; IL1R1; |
| | SRF; STAT1 |
| Neurotrophin/TRK Signaling | NTRK2; MAPK1; PTPN11; PIK3CA; CREB1; FOS; |
| | PIK3CB; PIK3C3; MAPK8; MAPK3; KRAS; PIK3C2A; |
| | RAF1; MAP2K2; AKT1; PIK3R1; PDPK1; MAP2K1; |
| | CDC42; JUN; ATF4 |
| FXR/RXR Activation | INS; PPARA; FASN; RXRA; AKT2; SDC1; MAPK8; |
| | APOB; MAPK10; PPARG; MTTP; MAPK9; PPARGC1A; |
| | TNF; CREBBP; AKT1; SREBF1; FGFR4; AKT3; FOXO1 |
| Synaptic Long Term | PRKCE; RAP1A; EP300; PRKCZ; MAPK1; CREB1; |
| Potentiation | PRKCI; GNAQ; CAMK2A; PRKD1; MAPK3; KRAS; |
| | PRKCD; PPP1CC; RAF1; CREBBP; MAP2K2; MAP2K1; |
| | ATF4; PRKCA |
| Calcium Signaling | RAP1A; EP300; HDAC4; MAPK1; HDAC5; CREB1; |
| | CAMK2A; MYH9; MAPK3; HDAC2; HDAC7A; HDAC11; |
| | HDAC9; HDAC3; CREBBP; CALR; CAMKK2; ATF4; |
| | HDAC6 |
| EGF Signaling | ELK1; MAPK1; EGFR; PIK3CA; FOS; PIK3CB; PIK3C3; |
| | MAPK8; MAPK3; PIK3C2A; RAF1; JAK1; PIK3R1; |
| | STAT3; MAP2K1; JUN; PRKCA; SRF; STAT1 |
| Hypoxia Signaling in the | EDN1; PTEN; EP300; NQO1; UBE21; CREB1; ARNT; |
| Cardiovascular System | HIF1A; SLC2A4; NOS3; TP53; LDHA; AKT1; ATM; |
| | VEGFA; JUN; ATF4; VHL; HSP90AA1 |
| LPS/IL-1 Mediated Inhibition | IRAK1; MYD88; TRAF6; PPARA; RXRA; ABCA1; |
| of RXR Function | MAPK8; ALDH1A1; GSTP1; MAPK9; ABCB1; TRAF2; |
| | TLR4; TNF; MAP3K7; NR1H2; SREBF1; JUN; IL1R1 |
| LXR/RXR Activation | FASN; RXRA; NCOR2; ABCA1; NFKB2; IRF3; RELA; |
| | NOS2A; TLR4; TNF; RELB; LDLR; NR1H2; NFKB1; |
| | SREBF1; IL1R1; CCL2; IL6; MMP9 |
| Amyloid Processing | PRKCE; CSNK1E; MAPK1; CAPNS1; AKT2; CAPN2; |
| | CAPN1; MAPK3; MAPK13; MAPT; MAPK14; AKT1; |
| | PSEN1; CSNK1A1; GSK3B; AKT3; APP |
| IL-4 Signaling | AKT2; PIK3CA; PIK3CB; PIK3C3; IRS1; KRAS; SOCS1; |
| | PTPN6; NR3C1; PIK3C2A; JAK1; AKT1; JAK2; PIK3R1; |
| | FRAP1; AKT3; RPS6KB1 |
| Cell Cycle: G2/M DNA | EP300; PCAF; BRCA1; GADD45A; PLK1; BTRC; |
| Damage Checkpoint | CHEK1; ATR; CHEK2; YWHAZ; TP53; CDKN1A; |
| Regulation | PRKDC; ATM; SFN; CDKN2A |
| Nitric Oxide Signaling in the | KDR; FLT1; PGF; AKT2; PIK3CA; PIK3CB; PIK3C3; |
| Cardiovascular System | CAV1; PRKCD; NOS3; PIK3C2A; AKT1; PIK3R1; |
| | VEGFA; AKT3; HSP90AA1 |
| Purine Metabolism | NME2; SMARCA4; MYH9; RRM2; ADAR; EIF2AK4; |
| | PKM2; ENTPD1; RAD51; RRM2B; TJP2; RAD51C; |
| | NT5E; POLD1; NME1 |
| CAMP-mediated Signaling | RAP1A; MAPK1; GNAS; CREB1; CAMK2A; MAPK3; |
| | SRC; RAF1; MAP2K2; STAT3; MAP2K1; BRAF; ATF4 |
| Mitochondrial Dysfunction | SOD2; MAPK8; CASP8; MAPK10; MAPK9; CASP9; |
| Notch Signaling | PARK7; PSEN1; PARK2; APP; CASP3 |
| | HES1; JAG1; NUMB; NOTCH4; ADAM17; NOTCH2; |
| | PSEN1; NOTCH3; NOTCH1; DLL4 |
| Endoplasmic Reticulum | HSPA5; MAPK8; XBP1; TRAF2; ATF6; CASP9; ATF4; |
| Stress Pathway | EIF2AK3; CASP3 |
| Pyrimidine Metabolism | NME2; AICDA; RRM2; EIF2AK4; ENTPD1; RRM2B; |
| | NT5E; POLD1; NME1 |
| Parkinson's Signaling | UCHL1; MAPK8; MAPK13; MAPK14; CASP9; PARK7; |
| | PARK2; CASP3 |
| Cardiac & Beta Adrenergic | GNAS; GNAQ; PPP2R1A; GNB2L1; PPP2CA; PPP1CC; |
| Signaling | PPP2R5C |
| Glycolysis/Gluconeogenesis | HK2; GCK; GPI; ALDH1A1; PKM2; LDHA; HK1 |
| Interferon Signaling | IRF1; SOCS1; JAK1; JAK2; IFITM1; STAT1; IFIT3 |
| Sonic Hedgehog Signaling | ARRB2; SMO; GLI2; DYRK1A; GLI1; GSK3B; DYRK1B |
| Glycerophospholipid | PLD1; GRN; GPAM; YWHAZ; SPHK1; SPHK2 |
| Metabolism | |
| Phospholipid Degradation | PRDX6; PLD1; GRN; YWHAZ; SPHK1; SPHK2 |
| Tryptophan Metabolism | SIAH2; PRMT5; NEDD4; ALDH1A1; CYP1B1; SIAH1 |
| Lysine Degradation | SUV39H1; EHMT2; NSD1; SETD7; PPP2R5C |
| Nucleotide Excision Repair | ERCC5; ERCC4; XPA; XPC; ERCC1 |
| Pathway | |
| Starch and Sucrose | UCHL1; HK2; GCK; GPI; HK1 |
| Metabolism | |
| Aminosugars Metabolism | NQO1; HK2; GCK; HK1 |
| Arachidonic Acid | PRDX6; GRN; YWHAZ; CYP1B1 |
| Metabolism | |
| Circadian Rhythm Signaling | CSNK1E; CREB1; ATF4; NR1D1 |
| Coagulation System | BDKRB1; F2R; SERPINE1; F3 |
| Dopamine Receptor | PPP2R1A; PPP2CA; PPP1CC; PPP2R5C |
| Signaling | |
| Glutathione Metabolism | IDH2; GSTP1; ANPEP; IDH1 |
| Glycerolipid Metabolism | ALDH1A1; GPAM; SPHK1; SPHK2 |
| Linoleic Acid Metabolism | PRDX6; GRN; YWHAZ; CYP1B1 |
| Methionine Metabolism | DNMT1; DNMT3B; AHCY; DNMT3A |
| Pyruvate Metabolism | GLO1; ALDH1A1; PKM2; LDHA |
| Arginine and Proline | ALDH1A1; NOS3; NOS2A |
| Metabolism | |
| Eicosanoid Signaling | PRDX6; GRN; YWHAZ |
| Fructose and Mannose | HK2; GCK; HK1 |
| Metabolism | |
| Galactose Metabolism | HK2; GCK; HK1 |
| Stilbene, Coumarine and | PRDX6; PRDX1; TYR |
| Lignin Biosynthesis | |
| Antigen Presentation | CALR; B2M |
| Pathway | |
| Biosynthesis of Steroids | NQO1; DHCR7 |
| Butanoate Metabolism | ALDH1A1; NLGN1 |
| Citrate Cycle | IDH2; IDH1 |
| Fatty Acid Metabolism | ALDH1A1; CYP1B1 |
| Glycerophospholipid | PRDX6; CHKA |
| Metabolism | |
| Histidine Metabolism | PRMT5; ALDH1A1 |
| Inositol Metabolism | ERO1L; APEX1 |
| Metabolism of Xenobiotics | GSTP1; CYP1B1 |
| by Cytochrome p450 | |
| Methane Metabolism | PRDX6; PRDX1 |
| Phenylalanine Metabolism | PRDX6; PRDX1 |
| Propanoate Metabolism | ALDH1A1; LDHA |
| Selenoamino Acid | PRMT5; AHCY |
| Metabolism | |
| Sphingolipid Metabolism | SPHK1; SPHK2 |
| Aminophosphonate | PRMT5 |
| Metabolism | |
| Androgen and Estrogen | PRMT5 |
| Metabolism | |
| Ascorbate and Aldarate | ALDH1A1 |
| Metabolism | |
| Bile Acid Biosynthesis | ALDH1A1 |
| Cysteine Metabolism | LDHA |
| Fatty Acid Biosynthesis | FASN |
| Glutamate Receptor | GNB2L1 |
| Signaling | |
| NRF2-mediated Oxidative | PRDX1 |
| Stress Response | |
| Pentose Phosphate | GPI |
| Pathway | |
| Pentose and Glucuronate | UCHL1 |
| Interconversions | |
| Retinol Metabolism | ALDH1A1 |
| Riboflavin Metabolism | TYR |
| Tyrosine Metabolism | PRMT5, TYR |
| Ubiquinone Biosynthesis | PRMT5 |
| Valine, Leucine and | ALDH1A1 |
| Isoleucine Degradation | |
| Glycine, Serine and | CHKA |
| Threonine Metabolism | |
| Lysine Degradation | ALDH1A1 |
| Pain/Taste | TRPM5; TRPA1 |
| Pain | TRPM7; TRPC5; TRPC6; TRPC1; Cnr1; cnr2; Grk2; |
| | Trpa1; Pomc; Cgrp; Crf; Pka; Era; Nr2b; TRPM5; Prkaca; |
| | Prkacb; Prkar1a; Prkar2a |
| Mitochondrial Function | AIF; CytC; SMAC (Diablo); Aifm-1; Aifm-2 |
| Developmental Neurology | BMP-4; Chordin (Chrd); Noggin (Nog); WNT (Wnt2; |
| | Wnt2b; Wnt3a; Wnt4; Wnt5a; Wnt6; Wnt7b; Wnt8b; |
| | Wnt9a; Wnt9b; Wnt10a; Wnt10b; Wnt16); beta-catenin; |
| | Dkk-1; Frizzled related proteins; Otx-2; Gbx2; FGF-8; |
| | Reelin; Dab1; unc-86 (Pou4f1 or Brn3a); Numb; Reln |

[0661] In an aspect, the invention provides a method of individualized or personalized treatment of a genetic disease in a subject in need of such treatment comprising: (a) introducing one or more mutations ex vivo in a tissue, organ or a cell line, or in vivo in a transgenic non-human mammal, comprising delivering to cell(s) of the tissue, organ, cell or mammal a composition comprising the particle delivery system or the delivery system or the virus particle of any one of the above embodiment or the cell of any one of the above embodiment, wherein the specific mutations or precise sequence substitutions are or have been correlated to the genetic disease; (b) testing treatment(s) for the genetic disease on the cells to which the vector has been delivered that have the specific mutations or precise sequence substitutions correlated to the genetic disease; and (c) treating the subject based on results from the testing of treatment(s) of step (b).

### Infectious Diseases

[0662] In some embodiments, the composition, system,(s) or component(s) thereof can be used to diagnose, prognose, treat, and/or prevent an infectious disease caused by a microorganism, such as bacteria, virus, fungi, parasites, or combinations thereof.

[0663] In some embodiments, the system(s) or component(s) thereof can be capable of targeting specific microorganism within a mixed population. Exemplary methods of such techniques are described in e.g. Gomaa A A, Klumpe H E, Luo M L, Selle K, Barrangou R, Beisel C L. 2014. Programmable removal of bacterial strains by use of genome-targeting composition, systems. mBio 5:e00928-13; Citorik R J, Mimee M, Lu T K. 2014. Sequence-specific antimicrobials using efficiently delivered RNA-guided nucleases. Nat Biotechnol 32:1141-1145, the teachings of which can be adapted for use with the compositions, systems, and components thereof described herein.

[0664] In some embodiments, the composition, system,(s) and/or components thereof can be capable of targeting pathogenic and/or drug-resistant microorganisms, such as bacteria, virus, parasites, and fungi. In some embodiments, the composition, system,(s) and/or components thereof can be capable of targeting and modifying one or more polynucleotides in a pathogenic microorganism such that the microorganism is less virulent, killed, inhibited, or is otherwise rendered incapable of causing disease and/or infecting and/or replicating in a host cell.

[0665] In some embodiments, the pathogenic bacteria that can be targeted and/or modified by the composition, system,(s) and/or component(s) thereof described herein include, but are not limited to, those of the genus Actinomyces (e.g. A. israelii), Bacillus (e.g. B. anthracis, B. cereus), Bactereoides (e.g. B. fragilis), Bartonella (B. henselae, B. quintana), Bordetella (B. pertussis), Borrelia (e.g. B. burgdorferi, B. garinii, B. afzelii, and B. recurreentis), Brucella (e.g. B. abortus, B. canis, B. melitensis, and B. suis), Campylobacter (e.g. C. jejuni), Chlamydia (e.g. C. pneumoniae and C. trachomatis), Chlamydophila (e.g. C. psittaci), Clostridium (e.g. C. botulinum, C. difficile, C. perfringens. C. tetani), Corynebacterium (e.g. C. diptheriae), Enterococcus (e.g. E. Faecalis, E. faecium), Ehrlichia (E. canis and E. chaffensis) Escherichia (e.g. E. coli), Francisella (e.g. F. tularensis), Haemophilus (e.g. H. influenzae), Helicobacter (H. pylori), Klebsiella (E.g. K. pneumoniae), Legionella (e.g. L. pneumophila), Leptospira (e.g. L. interrogans, L. santarosai, L. weilii, L. noguchii), Listereia (e.g. L. monocytogeenes), Mycobacterium (e.g. M. leprae, M. tuberculosis, M. ulcerans), Mycoplasma (M. pneumoniae), Neisseria (N. gonorrhoeae and N. menigitidis), Nocardia (e.g. N. asteeroides), Pseudomonas (P. aeruginosa), Rickettsia (R. rickettsia), Salmonella (S. typhi and S. typhimurium), Shigella (S. sonnei and S. dysenteriae), Staphylococcus (S. aureus, S. epidermidis, and S. saprophyticus), Streptococcus (S. agalactiaee, S. pneumoniae, S. pyogenes), Treponema (T. pallidum), Ureeaplasma (e.g. U. urealyticum), Vibrio (e.g. V. cholerae), Yersinia (e.g. Y pestis, Y, enteerocolitica, and Y, pseudotuberculosis).

[0666] In some embodiments, the pathogenic virus that can be targeted and/or modified by the composition, system,(s) and/or component(s) thereof described herein include, but are not limited to, a double-stranded DNA virus, a partly double-stranded DNA virus, a single-stranded DNA virus, a positive single-stranded RNA virus, a negative single-stranded RNA virus, or a double stranded RNA virus. In some embodiments, the pathogenic virus can be from the family Adenoviridae (e.g. Adenovirus), Herpesviridae (e.g. Herpes simplex, type 1, Herpes simplex, type 2, Varicella-zoster virus, Epstein-Barr virus, Human cytomegalovirus, Human herpesvirus, type 8), Papillomaviridae (e.g. Human papillomavirus), Polyomaviridae (e.g. BK virus, JC virus), Poxviridae (e.g. smallpox), Hepadnaviridae (e.g. Hepatitis B), Parvoviridae (e.g. Parvovirus B19), Astroviridae (e.g. Human astrovirus), Caliciviridae (e.g. Norwalk virus), Picornaviridae (e.g. coxsackievirus, hepatitis A virus, poliovirus, rhinovirus), Coronaviridae (e.g. Severe acute respiratory syndrome-related coronavirus, strains: Severe acute respiratory syndrome virus, Severe acute respiratory syndrome coronavirus 2 (COVID-19)), Flaviviridae (e.g. Hepatitis C virus, yellow fever virus, dengue virus, West Nile virus, TBE virus), Togaviridae (e.g. Rubella virus), Hepeviridae (e.g. Hepatitis E virus), Retroviridae (Human immunodeficiency virus (HIV)), Orthomyxoviridae (e.g. Influenza virus), Arenaviridae (e.g. Lassa virus), Bunyaviridae (e.g. Crimean-Congo hemorrhagic fever virus, Hantaan virus), Filoviridae (e.g. Ebola virus and Marburg virus), Paramyxoviridae (e.g. Measles virus, Mumps virus, Parainfluenza virus, Respiratory syncytial virus), Rhabdoviridae (Rabies virus), Hepatitis D virus, Reoviridae (e.g. Rotavirus, Orbivirus, Coltivirus, Banna virus).

[0667] In some embodiments, the pathogenic fungi that can be targeted and/or modified by the composition, system,(s) and/or component(s) thereof described herein include, but are not limited to, those of the genus Candida (e.g. C. albicans), Aspergillus (e.g. A. fumigatus, A. flavus, A. clavatus), Cryptococcus (e.g. C. neoformans, C. gattii), Histoplasma (H. capsulatum), Pneumocystis (e.g. P. jiroveecii), Stachybotrys (e.g. S. chartarum).

[0668] In some embodiments, the pathogenic parasites that can be targeted and/or modified by the composition, system,(s) and/or component(s) thereof described herein include, but are not limited to, protozoa, helminths, and ectoparasites. In some embodiments, the pathogenic protozoa that can be targeted and/or modified by the composition, system,(s) and/or component(s) thereof described herein include, but are not limited to, those from the groups Sarcodina (e.g. ameba such as Entamoeba), Mastigophora (e.g. flagellates such as Giardia and Leishmania), Cilophora (e.g. ciliates such as Balantidum), and sporozoa (e.g. plasmodium and cryptosporidium). In some embodiments, the pathogenic helminths that can be targeted and/or modified by the composition, system,(s) and/or component(s) thereof described herein include, but are not limited to, flatworms (platyhelminths), thorny-headed worms (acanthoceephalins), and roundworms (nematodes). In some embodiments, the pathogenic ectoparasites that can be targeted and/or modified by the composition, system,(s) and/or component(s) thereof described herein include, but are not limited to, ticks, fleas, lice, and mites.

[0669] In some embodiments, the pathogenic parasite that can be targeted and/or modified by the composition, system,(s) and/or component(s) thereof described herein include, but are not limited to, Acanthamoeba spp., Balamuthia mandrillaris, Babesiosis spp. (e.g. Babesia B. divergens, B. bigemina, B. equi, B. microfti, B. duncani), Balantidiasis spp. (e.g. Balantidium coli), Blastocystis spp., Cryptosporidium spp., Cyclosporiasis spp. (e.g. Cyclospora cayetanensis), Dientamoebiasis spp. (e.g. Dientamoeba fragilis), Amoebiasis spp. (e.g. Entamoeba histolytica), Giardiasis spp. (e.g. Giardia lamblia), Isosporiasis spp. (e.g. Isospora belli), Leishmania spp., Naegleria spp. (e.g. Naegleria fowleri), Plasmodium spp. (e.g. Plasmodium falciparum, Plasmodium vivax, Plasmodium ovale curtisi, Plasmodium ovale wallikeri, Plasmodium malariae, Plasmodium knowlesi), Rhinosporidiosis spp. (e.g. Rhinosporidium seeberi), Sarcocystosis spp. (e.g. Sarcocystis bovihominis, Sarcocystis suihominis), Toxoplasma spp. (e.g. Toxoplasma gondii), Trichomonas spp. (e.g. Trichomonas vaginalis), Trypanosoma spp. (e.g. Trypanosoma brucei), Trypanosoma spp. (e.g. Trypanosoma cruzi), Tapeworm (e.g. Cestoda, Taenia multiceps, Taenia saginata, Taenia solium), Diphyllobothrium latum spp., Echinococcus spp. (e.g. Echinococcus granulosus, Echinococcus multilocularis, E. vogeli, E. oligarthrus), Hymenolepis spp. (e.g. Hymenolepis nana, Hymenolepis diminuta), Bertiella spp. (e.g. Bertiella mucronata, Bertiella studeri), Spirometra (e.g. Spirometra erinaceieuropaei), Clonorchis spp. (e.g. Clonorchis sinensis; Clonorchis viverrini), Dicrocoelium spp. (e.g. Dicrocoelium dendriticum), Fasciola spp. (e.g. Fasciola hepatica, Fasciola gigantica), Fasciolopsis spp. (e.g. Fasciolopsis buski), Metagonimus spp. (e.g. Metagonimus yokogawai), Metorchis spp. (e.g. Metorchis conjunctus), Opisthorchis spp. (e.g. Opisthorchis viverrini, Opisthorchis felineus), Clonorchis spp. (e.g. Clonorchis sinensis), Paragonimus spp. (e.g. Paragonimus westermani; Paragonimus africanus; Paragonimus caliensis; Paragonimus kellicotti; Paragonimus skrjabini; Paragonimus uterobilateralis), Schistosoma sp., Schistosoma spp. (e.g. Schistosoma mansoni, Schistosoma haematobium, Schistosoma japonicum, Schistosoma mekongi, and Schistosoma intercalatum), Echinostoma spp. (e.g. E. echinatum), Trichobilharzia spp. (e.g. Trichobilharzia regent), Ancylostoma spp. (e.g. Ancylostoma duodenale), Necator spp. (e.g. Necator americanus), Angiostrongylus spp., Anisakis spp., Ascaris spp. (e.g. Ascaris lumbricoides), Baylisascaris spp. (e.g. Baylisascaris procyonis), Brugia spp. (e.g. Brugia malayi, Brugia timori), Dioctophyme spp. (e.g. Dioctophyme renale), Dracunculus spp. (e.g. Dracunculus medinensis), Enterobius spp. (e.g. Enterobius vermicularis, Enterobius gregorii), Gnathostoma spp. (e.g. Gnathostoma spinigerum, Gnathostoma hispidum), Halicephalobus spp. (e.g. Halicephalobus gingivalis), Loa loa spp. (e.g. Loa loa filaria), Mansonella spp. (e.g. Mansonella streptocerca), Onchocerca spp. (e.g. Onchocerca volvulus), Strongyloides spp. (e.g. Strongyloides stercoralis), Thelazia spp. (e.g. Thelazia californiensis, Thelazia callipaeda), Toxocara spp. (e.g. Toxocara canis, Toxocara cati, Toxascaris leonine), Trichinella spp. (e.g. Trichinella spiralis, Trichinella britovi, Trichinella nelsoni, Trichinella nativa), Trichuris spp. (e.g. Trichuris trichiura, Trichuris vulpis), Wuchereria spp. (e.g. Wuchereria bancrofti), Dermatobia spp. (e.g. Dermatobia hominis), Tunga spp. (e.g. Tunga penetrans), Cochliomyia spp. (e.g. Cochliomyia hominivorax), Linguatula spp. (e.g. Linguatula serrata), Archiacanthocephala sp., Moniliformis sp. (e.g. Moniliformis moniliformis), Pediculus spp. (e.g. Pediculus humanus capitis, Pediculus humanus humanus), Pthirus spp. (e.g. Pthirus pubis), Arachnida spp. (e.g. Trombiculidae, Ixodidae, Argaside), Siphonaptera spp (e.g. Siphonaptera: Pulicinae), Cimicidae spp. (e.g. Cimex lectularius and Cimex hemipterus), Diptera spp., Demodex spp. (e.g. Demodex folliculorum/brevis/canis), Sarcoptes spp. (e.g. Sarcoptes scabiei), Dermanyssus spp. (e.g. Dermanyssus gallinae), Ornithonyssus spp. (e.g. Ornithonyssus sylviarum, Ornithonyssus bursa, Ornithonyssus bacoti), Laelaps spp. (e.g. Laelaps echidnina), Liponyssoides spp. (e.g. Liponyssoides sanguineus).

[0670] In some embodiments, the gene targets can be any of those as set forth in Table 1 of Strich and Chertow. 2019. J. Clin. Microbio. 57:4 e01307-18, which is incorporated herein as if expressed in its entirety herein.

[0671] In some embodiments, the method can include delivering a composition, system, and/or component thereof to a pathogenic organism described herein, allowing the composition, system, and/or component thereof to specifically bind and modify one or more targets in the pathogenic organism, whereby the modification kills, inhibits, reduces the pathogenicity of the pathogenic organism, or otherwise renders the pathogenic organism non-pathogenic. In some embodiments, delivery of the composition, system, occurs in vivo (i.e. in the subject being treated). In some embodiments occurs by an intermediary, such as microorganism or phage that is non-pathogenic to the subject but is capable of transferring polynucleotides and/or infecting the pathogenic microorganism. In some embodiments, the intermediary microorganism can be an engineered bacteria, virus, or phage that contains the composition, system,(s) and/or component(s) thereof and/or CRISPR-Cas vectors and/or vector systems. The method can include administering an intermediary microorganism containing the composition, system,(s) and/or component(s) thereof and/or CRISPR-Cas vectors and/or vector systems to the subject to be treated. The intermediary microorganism can then produce the CRISPR-system and/or component thereof or transfer a composition, system, polynucleotide to the pathogenic organism. In embodiments, where the CRISPR-system and/or component thereof, vector, or vector system is transferred to the pathogenic microorganism, the composition, system, or component thereof is then produced in the pathogenic microorganism and modifies the pathogenic microorganism such that it is less virulent, killed, inhibited, or is otherwise rendered incapable of causing disease and/or infecting and/or replicating in a host or cell thereof.

[0672] In some embodiments, where the pathogenic microorganism inserts its genetic material into the host cell's genome (e.g. a virus), the composition, system can be designed such that it modifies the host cell's genome such that the viral DNA or cDNA cannot be replicated by the host cell's machinery into a functional virus. In some embodiments, where the pathogenic microorganism inserts its genetic material into the host cell's genome (e.g. a virus), the composition, system, can be designed such that it modifies the host cell's genome such that the viral DNA or cDNA is deleted from the host cell's genome.

[0673] It will be appreciated that inhibiting or killing the pathogenic microorganism, the disease and/or condition that its infection causes in the subject can be treated or prevented. Thus, also provided herein are methods of treating and/or preventing one or more diseases or symptoms thereof caused by any one or more pathogenic microorganisms, such as any of those described herein.

### Mitochondrial Diseases

[0674] Some of the most challenging mitochondrial disorders arise from mutations in mitochondrial DNA (mtDNA), a high copy number genome that is maternally inherited. In some embodiments, mtDNA mutations can be modified using a composition, system, described herein. In some embodiments, the mitochondrial disease that can be diagnosed, prognosed, treated, and/or prevented can be MELAS (mitochondrial myopathy encephalopathy, and lactic acidosis and stroke-like episodes), CPEO/PEO (chronic progressive external ophthalmoplegia syndrome/progressive external ophthalmoplegia), KSS (Kearns-Sayre syndrome), MIDD (maternally inherited diabetes and deafness), MERRF (myoclonic epilepsy associated with ragged red fibers), NIDDM (noninsulin-dependent diabetes mellitus), LHON (Leber hereditary optic neuropathy), LS (Leigh Syndrome) an aminoglycoside induced hearing disorder, NARP (neuropathy, ataxia, and pigmentary retinopathy), Extrapyramidal disorder with akinesia-rigidity, psychosis and SNHL, Nonsyndromic hearing loss a cardiomyopathy, an encephalomyopathy, Pearson's syndrome, or a combination thereof.

[0675] In some embodiments, the mtDNA of a subject can be modified in vivo or ex vivo. In some embodiments, where the mtDNA is modified ex vivo, after modification the cells containing the modified mitochondria can be administered back to the subject. In some embodiments, the composition, system, or component thereof can be capable of correcting an mtDNA mutation, or a combination thereof.

[0676] In some embodiments, at least one of the one or more mtDNA mutations is selected from the group consisting of: A3243G, C3256T, T3271C, G1019A, A1304T, A15533G, C1494T, C4467A, T1658C, G12315A, A3421G, A8344G, T8356C, G8363A, A13042T, T3200C, G3242A, A3252G, T3264C, G3316A, T3394C, T14577C, A4833G, G3460A, G9804A, G11778A, G14459A, A14484G, G15257A, T8993C, T8993G, G10197A, G13513A, T1095C, C1494T, A1555G, G1541A, C1634T, A3260G, A4269G, T7587C, A8296G, A8348G, G8363A, T9957C, T9997C, G12192A, C12297T, A14484G, G15059A, duplication of CCCCCTCCCC-tandem repeats at positions 305-314 and/or 956-965, deletion at positions from 8,469-13,447, 4,308-14,874, and/or 4,398-14,822, 961ins/delC, the mitochondrial common deletion (e.g. mtDNA 4,977 bp deletion), and combinations thereof.

[0677] In some embodiments, the mitochondrial mutation can be any mutation as set forth in or as identified by use of one or more bioinformatic tools available at Mitomap available at mitomap.org. Such tools include, but are not limited to, “Variant Search, aka Market Finder”, Find Sequences for Any Haplogroup, aka “Sequence Finder”, “Variant Info”, “POLG Pathogenicity Prediction Server”, “MITOMASTER”, “Allele Search”, “Sequence and Variant Downloads”, “Data Downloads”. MitoMap contains reports of mutations in mtDNA that can be associated with disease and maintains a database of reported mitochondrial DNA Base Substitution Diseases: rRNA/tRNA mutations.

[0678] In some embodiments, the method includes delivering a composition, system, and/or a component thereof to a cell, and more specifically one or more mitochondria in a cell, allowing the composition, system, and/or component thereof to modify one or more target polynucleotides in the cell, and more specifically one or more mitochondria in the cell. The target polynucleotides can correspond to a mutation in the mtDNA, such as any one or more of those described herein. In some embodiments, the modification can alter a function of the mitochondria such that the mitochondria functions normally or at least is/are less dysfunctional as compared to an unmodified mitochondria. Modification can occur in vivo or ex vivo. Where modification is performed ex vivo, cells containing modified mitochondria can be administered to a subject in need thereof in an autologous or allogenic manner.

### Microbiome Modification

[0679] Microbiomes play important roles in health and disease. For example, the gut microbiome can play a role in health by controlling digestion, preventing growth of pathogenic microorganisms and have been suggested to influence mood and emotion. Imbalanced microbiomes can promote disease and are suggested to contribute to weight gain, unregulated blood sugar, high cholesterol, cancer, and other disorders. A healthy microbiome has a series of joint characteristics that can be distinguished from non-healthy individuals, thus detection and identification of the disease-associated microbiome can be used to diagnose and detect disease in an individual. The compositions, systems, and components thereof can be used to screen the microbiome cell population and be used to identify a disease associated microbiome. Cell screening methods utilizing compositions, systems, and components thereof are described elsewhere herein and can be applied to screening a microbiome, such as a gut, skin, vagina, and/or oral microbiome, of a subject.

[0680] In some embodiments, the microbe population of a microbiome in a subject can be modified using a composition, system, and/or component thereof described herein. In some embodiments, the composition, system, and/or component thereof can be used to identify and select one or more cell types in the microbiome and remove them from the microbiome population. Exemplary methods of selecting cells using a composition, system, and/or component thereof are described elsewhere herein. In this way the make-up or microorganism profile of the microbiome can be altered. In some embodiments, the alteration causes a change from a diseased microbiome composition to a healthy microbiome composition. In this way the ratio of one type or species of microorganism to another can be modified, such as going from a diseased ratio to a healthy ratio. In some embodiments, the cells selected are pathogenic microorganisms.

[0681] In some embodiments, the compositions, systems, described herein can be used to modify a polynucleotide in a microorganism of a microbiome in a subject. In some embodiments, the microorganism is a pathogenic microorganism. In some embodiments, the microorganism is a commensal and non-pathogenic microorganism. Methods of modifying polynucleotides in a cell in the subject are described elsewhere herein and can be applied to these embodiments.

### Adoptive Therapy

[0682] The compositions, systems, and components thereof described herein can be used to modify cells for an adoptive cell therapy. In an aspect of the invention, methods and compositions which involve editing a target nucleic acid sequence, or modulating expression of a target nucleic acid sequence, and applications thereof in connection with cancer immunotherapy are comprehended by adapting the composition, system, of the present invention.

[0683] As used herein, “ACT”, “adoptive cell therapy” and “adoptive cell transfer” may be used interchangeably. In certain embodiments, Adoptive cell therapy (ACT) can refer to the transfer of cells to a patient with the goal of transferring the functionality and characteristics into the new host by engraftment of the cells (see, e.g., Mettananda et al., Editing an α-globin enhancer in primary human hematopoietic stem cells as a treatment for β-thalassemia, Nat Commun. 2017 Sep. 4; 8(1):424). As used herein, the term “engraft” or “engraftment” refers to the process of cell incorporation into a tissue of interest in vivo through contact with existing cells of the tissue. Adoptive cell therapy (ACT) can refer to the transfer of cells, most commonly immune-derived cells, back into the same patient or into a new recipient host with the goal of transferring the immunologic functionality and characteristics into the new host. If possible, use of autologous cells helps the recipient by minimizing GVHD issues. The adoptive transfer of autologous tumor infiltrating lymphocytes (TIL) (Zacharakis et al., (2018) Nat Med. 2018 June; 24(6):724-730; Besser et al., (2010) Clin. Cancer Res 16 (9) 2646-55; Dudley et al., (2002) Science 298 (5594): 850-4; and Dudley et al., (2005) Journal of Clinical Oncology 23 (10): 2346-57.) or genetically re-directed peripheral blood mononuclear cells (Johnson et al., (2009) Blood 114 (3): 535-46; and Morgan et al., (2006) Science 314(5796) 126-9) has been used to successfully treat patients with advanced solid tumors, including melanoma, metastatic breast cancer and colorectal carcinoma, as well as patients with CD19-expressing hematologic malignancies (Kalos et al., (2011) Science Translational Medicine 3 (95): 95ra73). In certain embodiments, allogenic cells immune cells are transferred (see, e.g., Ren et al., (2017) Clin Cancer Res 23 (9) 2255-2266). As described further herein, allogenic cells can be edited to reduce alloreactivity and prevent graft-versus-host disease. Thus, use of allogenic cells allows for cells to be obtained from healthy donors and prepared for use in patients as opposed to preparing autologous cells from a patient after diagnosis.

[0684] Aspects of the invention involve the adoptive transfer of immune system cells, such as T cells, specific for selected antigens, such as tumor associated antigens or tumor specific neoantigens (see, e.g., Maus et al., 2014, Adoptive Immunotherapy for Cancer or Viruses, Annual Review of Immunology, Vol. 32: 189-225; Rosenberg and Restifo, 2015, Adoptive cell transfer as personalized immunotherapy for human cancer, Science Vol. 348 no. 6230 pp. 62-68; Restifo et al., 2015, Adoptive immunotherapy for cancer: harnessing the T cell response. Nat. Rev. Immunol. 12(4): 269-281; and Jenson and Riddell, 2014, Design and implementation of adoptive therapy with chimeric antigen receptor-modified T cells. Immunol Rev. 257(1): 127-144; and Rajasagi et al., 2014, Systematic identification of personal tumor-specific neoantigens in chronic lymphocytic leukemia. Blood. 2014 Jul. 17; 124(3):453-62).

[0685] In certain embodiments, an antigen (such as a tumor antigen) to be targeted in adoptive cell therapy (such as particularly CAR or TCR T-cell therapy) of a disease (such as particularly of tumor or cancer) may be selected from a group consisting of: MR1 (see, e.g., Crowther, et al., 2020, Genome-wide CRISPR-Cas9 screening reveals ubiquitous T cell cancer targeting via the monomorphic MHC class I-related protein MR1, Nature Immunology volume 21, pages 178-185), B cell maturation antigen (BCMA) (see, e.g., Friedman et al., Effective Targeting of Multiple BCMA-Expressing Hematological Malignancies by Anti-BCMA CAR T Cells, Hum Gene Ther. 2018 Mar. 8; Berdeja J G, et al. Durable clinical responses in heavily pretreated patients with relapsed/refractory multiple myeloma: updated results from a multicenter study of bb2121 anti-Bcma CAR T cell therapy. Blood. 2017; 130:740; and Mouhieddine and Ghobrial, Immunotherapy in Multiple Myeloma: The Era of CAR T Cell Therapy, Hematologist, May-June 2018, Volume 15, issue 3); PSA (prostate-specific antigen); prostate-specific membrane antigen (PSMA); PSCA (Prostate stem cell antigen); Tyrosine-protein kinase transmembrane receptor ROR1; fibroblast activation protein (FAP); Tumor-associated glycoprotein 72 (TAG72); Carcinoembryonic antigen (CEA); Epithelial cell adhesion molecule (EPCAM); Mesothelin; Human Epidermal growth factor Receptor 2 (ERBB2 (Her2/neu)); Prostase; Prostatic acid phosphatase (PAP); elongation factor 2 mutant (ELF2M); Insulin-like growth factor 1 receptor (IGF-1R); gplOO; BCR-ABL (breakpoint cluster region-Abelson); tyrosinase; New York esophageal squamous cell carcinoma 1 (NY-ESO-1); x-light chain, LAGE (L antigen); MAGE (melanoma antigen); Melanoma-associated antigen 1 (MAGE-A1); MAGE A3; MAGE A6; legumain; Human papillomavirus (HPV) E6; HPV E7; prostein; survivin; PCTA1 (Galectin 8); Melan-A/MART-1; Ras mutant; TRP-1 (tyrosinase related protein 1, or gp75); Tyrosinase-related Protein 2 (TRP2); TRP-2/INT2 (TRP-2/intron 2); RAGE (renal antigen); receptor for advanced glycation end products 1 (RAGE1); Renal ubiquitous 1, 2 (RU1, RU2); intestinal carboxyl esterase (iCE); Heat shock protein 70-2 (HSP70-2) mutant; thyroid stimulating hormone receptor (TSHR); CD123; CD171; CD19; CD20; CD22; CD26; CD30; CD33; CD44v7/8 (cluster of differentiation 44, exons 7/8); CD53; CD92; CD100; CD148; CD150; CD200; CD261; CD262; CD362; CS-1 (CD2 subset 1, CRACC, SLAMF7, CD319, and 19A24); C-type lectin-like molecule-1 (CLL-1); ganglioside GD3 (aNeu5Ac(2-8)aNeu5Ac(2-3)bDGalp(1-4)bDGlcp(1-1)Cer); Tn antigen (Tn Ag); Fms-Like Tyrosine Kinase 3 (FLT3); CD38; CD138; CD44v6; B7H3 (CD276); KIT (CD 117); Interleukin-13 receptor subunit alpha-2 (IL-13Ra2); Interleukin 11 receptor alpha (IL-11Ra); prostate stem cell antigen (PSCA); Protease Serine 21 (PRSS21); vascular endothelial growth factor receptor 2 (VEGFR2); Lewis(Y) antigen; CD24; Platelet-derived growth factor receptor beta (PDGFR-beta); stage-specific embryonic antigen-4 (SSEA-4); Mucin 1, cell surface associated (MUC1); mucin 16 (MUC16); epidermal growth factor receptor (EGFR); epidermal growth factor receptor variant III (EGFRvIII); neural cell adhesion molecule (NCAM); carbonic anhydrase IX (CAIX); Proteasome (Prosome, Macropain) Subunit, Beta Type, 9 (LMP2); ephrin type-A receptor 2 (EphA2); Ephrin B2; Fucosyl GM1; sialyl Lewis adhesion molecule (sLe); ganglioside GM3 (aNeu5Ac(2-3)bDGalp(1-4)bDGlcp(1-1)Cer); TGS5; high molecular weight-melanoma-associated antigen (HMWMAA); o-acetyl-GD2 ganglioside (OAcGD2); Folate receptor alpha; Folate receptor beta; tumor endothelial marker 1 (TEM1/CD248); tumor endothelial marker 7-related (TEM7R); claudin 6 (CLDN6); G protein-coupled receptor class C group 5, member D (GPRC5D); chromosome X open reading frame 61 (CXORF61); CD97; CD179a; anaplastic lymphoma kinase (ALK); Polysialic acid; placenta-specific 1 (PLAC1); hexasaccharide portion of globoH glycoceramide (GloboH); mammary gland differentiation antigen (NY-BR-1); uroplakin 2 (UPK2); Hepatitis A virus cellular receptor 1 (HAVCR1); adrenoceptor beta 3 (ADRB3); pannexin 3 (PANX3); G protein-coupled receptor 20 (GPR20); lymphocyte antigen 6 complex, locus K 9 (LY6K); Olfactory receptor 51E2 (OR51E2); TCR Gamma Alternate Reading Frame Protein (TARP); Wilms tumor protein (WT1); ETS translocation-variant gene 6, located on chromosome 12p (ETV6-AML); sperm protein 17 (SPA17); X Antigen Family, Member 1A (XAGE1); angiopoietin-binding cell surface receptor 2 (Tie 2); CT (cancer/testis (antigen)); melanoma cancer testis antigen-1 (MAD-CT-1); melanoma cancer testis antigen-2 (MAD-CT-2); Fos-related antigen 1; p53; p53 mutant; human Telomerase reverse transcriptase (hTERT); sarcoma translocation breakpoints; melanoma inhibitor of apoptosis (ML-IAP); ERG (transmembrane protease, serine 2 (TMPRSS2) ETS fusion gene); N-Acetyl glucosaminyl-transferase V (NA17); paired box protein Pax-3 (PAX3); Androgen receptor; Cyclin B1; Cyclin D1; v-myc avian myelocytomatosis viral oncogene neuroblastoma derived homolog (MYCN); Ras Homolog Family Member C (RhoC); Cytochrome P450 1B1 (CYP1B1); CCCTC-Binding Factor (Zinc Finger Protein)-Like (BORIS); Squamous Cell Carcinoma Antigen Recognized By T Cells-1 or 3 (SART1, SART3); Paired box protein Pax-5 (PAX5); proacrosin binding protein sp32 (OY-TES1); lymphocyte-specific protein tyrosine kinase (LCK); A kinase anchor protein 4 (AKAP-4); synovial sarcoma, X breakpoint-1, -2, -3 or -4 (SSX1, SSX2, SSX3, SSX4); CD79a; CD79b; CD72; Leukocyte-associated immunoglobulin-like receptor 1 (LAIR1); Fc fragment of IgA receptor (FCAR); Leukocyte immunoglobulin-like receptor subfamily A member 2 (LILRA2); CD300 molecule-like family member f (CD300LF); C-type lectin domain family 12 member A (CLECI2A); bone marrow stromal cell antigen 2 (BST2); EGF-like module-containing mucin-like hormone receptor-like 2 (EMR2); lymphocyte antigen 75 (LY75); Glypican-3 (GPC3); Fc receptor-like 5 (FCRL5); mouse double minute 2 homolog (MDM2); livin; alphafetoprotein (AFP); transmembrane activator and CAML Interactor (TACI); B-cell activating factor receptor (BAFF-R); V-Ki-ras2 Kirsten rat sarcoma viral oncogene homolog (KRAS); immunoglobulin lambda-like polypeptide 1 (IGLL1); 707-AP (707 alanine proline); ART-4 (adenocarcinoma antigen recognized by T4 cells); BAGE (B antigen; b-catenin/m, b-catenin/mutated); CAMEL (CTL-recognized antigen on melanoma); CAP1 (carcinoembryonic antigen peptide 1); CASP-8 (caspase-8); CDC27m (cell-division cycle 27 mutated); CDK4/m (cycline-dependent kinase 4 mutated); Cyp-B (cyclophilin B); DAM (differentiation antigen melanoma); EGP-2 (epithelial glycoprotein 2); EGP-40 (epithelial glycoprotein 40); Erbb2, 3, 4 (erythroblastic leukemia viral oncogene homolog-2, -3, 4); FBP (folate binding protein); fAchR (Fetal acetylcholine receptor); G250 (glycoprotein 250); GAGE (G antigen); GnT-V (N-acetylglucosaminyltransferase V); HAGE (helicose antigen); ULA-A (human leukocyte antigen-A); HST2 (human signet ring tumor 2); KIAA0205; KDR (kinase insert domain receptor); LDLR/FUT (low density lipid receptor/GDP L-fucose: b-D-galactosidase 2-a-L fucosyltransferase); L1CAM (L1 cell adhesion molecule); MC1R (melanocortin 1 receptor); Myosin/m (myosin mutated); MUM-1, -2, -3 (melanoma ubiquitous mutated 1, 2, 3); NA88-A (NA cDNA clone of patient M88); KG2D (Natural killer group 2, member D) ligands; oncofetal antigen (h5T4); p190 minor bcr-abl (protein of 190KD bcr-abl); Pml/RARa (promyelocytic leukaemia/retinoic acid receptor a); PRAME (preferentially expressed antigen of melanoma); SAGE (sarcoma antigen); TEL/AML 1 (translocation Ets-family leukemia/acute myeloid leukemia 1); TPI/m (triosephosphate isomerase mutated); CD70; and any combination thereof.

[0686] In certain embodiments, an antigen to be targeted in adoptive cell therapy (such as particularly CAR or TCR T-cell therapy) of a disease (such as particularly of tumor or cancer) is a tumor-specific antigen (TSA).

[0687] In certain embodiments, an antigen to be targeted in adoptive cell therapy (such as particularly CAR or TCR T-cell therapy) of a disease (such as particularly of tumor or cancer) is a neoantigen.

[0688] In certain embodiments, an antigen to be targeted in adoptive cell therapy (such as particularly CAR or TCR T-cell therapy) of a disease (such as particularly of tumor or cancer) is a tumor-associated antigen (TAA).

[0689] In certain embodiments, an antigen to be targeted in adoptive cell therapy (such as particularly CAR or TCR T-cell therapy) of a disease (such as particularly of tumor or cancer) is a universal tumor antigen. In certain preferred embodiments, the universal tumor antigen is selected from the group consisting of: a human telomerase reverse transcriptase (hTERT), survivin, mouse double minute 2 homolog (MDM2), cytochrome P450 1B 1 (CYP1B), HER2/neu, Wilms' tumor gene 1 (WT1), livin, alphafetoprotein (AFP), carcinoembryonic antigen (CEA), mucin 16 (MUC16), MUC1, prostate-specific membrane antigen (PSMA), p53, cyclin (Dl), and any combinations thereof.

[0690] In certain embodiments, an antigen (such as a tumor antigen) to be targeted in adoptive cell therapy (such as particularly CAR or TCR T-cell therapy) of a disease (such as particularly of tumor or cancer) may be selected from a group consisting of: CD19, BCMA, CD70, CLL-1, MAGE A3, MAGE A6, HPV E6, HPV E7, WT1, CD22, CD171, ROR1, MUC16, and SSX2. In certain preferred embodiments, the antigen may be CD19. For example, CD19 may be targeted in hematologic malignancies, such as in lymphomas, more particularly in B-cell lymphomas, such as without limitation in diffuse large B-cell lymphoma, primary mediastinal b-cell lymphoma, transformed follicular lymphoma, marginal zone lymphoma, mantle cell lymphoma, acute lymphoblastic leukemia including adult and pediatric ALL, non-Hodgkin lymphoma, indolent non-Hodgkin lymphoma, or chronic lymphocytic leukemia. For example, BCMA may be targeted in multiple myeloma or plasma cell leukemia (see, e.g., 2018 American Association for Cancer Research (AACR) Annual meeting Poster: Allogeneic Chimeric Antigen Receptor T Cells Targeting B Cell Maturation Antigen). For example, CLL1 may be targeted in acute myeloid leukemia. For example, MAGE A3, MAGE A6, SSX2, and/or KRAS may be targeted in solid tumors. For example, HPV E6 and/or HPV E7 may be targeted in cervical cancer or head and neck cancer. For example, WT1 may be targeted in acute myeloid leukemia (AML), myelodysplastic syndromes (MDS), chronic myeloid leukemia (CML), non-small cell lung cancer, breast, pancreatic, ovarian or colorectal cancers, or mesothelioma. For example, CD22 may be targeted in B cell malignancies, including non-Hodgkin lymphoma, diffuse large B-cell lymphoma, or acute lymphoblastic leukemia. For example, CD171 may be targeted in neuroblastoma, glioblastoma, or lung, pancreatic, or ovarian cancers. For example, ROR1 may be targeted in ROR1+ malignancies, including non-small cell lung cancer, triple negative breast cancer, pancreatic cancer, prostate cancer, ALL, chronic lymphocytic leukemia, or mantle cell lymphoma. For example, MUC16 may be targeted in MUC16ecto+ epithelial ovarian, fallopian tube or primary peritoneal cancer. For example, CD70 may be targeted in both hematologic malignancies as well as in solid cancers such as renal cell carcinoma (RCC), gliomas (e.g., GBM), and head and neck cancers (HNSCC). CD70 is expressed in both hematologic malignancies as well as in solid cancers, while its expression in normal tissues is restricted to a subset of lymphoid cell types (see, e.g., 2018 American Association for Cancer Research (AACR) Annual meeting Poster: Allogeneic CRISPR Engineered Anti-CD70 CAR-T Cells Demonstrate Potent Preclinical Activity Against Both Solid and Hematological Cancer Cells).

[0691] Various strategies may for example be employed to genetically modify T cells by altering the specificity of the T cell receptor (TCR) for example by introducing new TCR a and R chains with selected peptide specificity (see U.S. Pat. No. 8,697,854; PCT Patent Publications: WO2003020763, WO2004033685, WO2004044004, WO2005114215, WO2006000830, WO2008038002, WO2008039818, WO2004074322, WO2005113595, WO2006125962, WO2013166321, WO2013039889, WO2014018863, WO2014083173; U.S. Pat. No. 8,088,379).

[0692] As an alternative to, or addition to, TCR modifications, chimeric antigen receptors (CARs) may be used in order to generate immunoresponsive cells, such as T cells, specific for selected targets, such as malignant cells, with a wide variety of receptor chimera constructs having been described (see U.S. Pat. Nos. 5,843,728; 5,851,828; 5,912,170; 6,004,811; 6,284,240; 6,392,013; 6,410,014; 6,753,162; 8,211,422; and, PCT Publication WO9215322).

[0693] In general, CARs are comprised of an extracellular domain, a transmembrane domain, and an intracellular domain, wherein the extracellular domain comprises an antigen-binding domain that is specific for a predetermined target. While the antigen-binding domain of a CAR is often an antibody or antibody fragment (e.g., a single chain variable fragment, scFv), the binding domain is not particularly limited so long as it results in specific recognition of a target. For example, in some embodiments, the antigen-binding domain may comprise a receptor, such that the CAR is capable of binding to the ligand of the receptor. Alternatively, the antigen-binding domain may comprise a ligand, such that the CAR is capable of binding the endogenous receptor of that ligand.

[0694] The antigen-binding domain of a CAR is generally separated from the transmembrane domain by a hinge or spacer. The spacer is also not particularly limited, and it is designed to provide the CAR with flexibility. For example, a spacer domain may comprise a portion of a human Fc domain, including a portion of the CH3 domain, or the hinge region of any immunoglobulin, such as IgA, IgD, IgE, IgG, or IgM, or variants thereof. Furthermore, the hinge region may be modified so as to prevent off-target binding by FcRs or other potential interfering objects. For example, the hinge may comprise an IgG4 Fc domain with or without a S228P, L235E, and/or N297Q mutation (according to Kabat numbering) in order to decrease binding to FcRs. Additional spacers/hinges include, but are not limited to, CD4, CD8, and CD28 hinge regions.

[0695] The transmembrane domain of a CAR may be derived either from a natural or from a synthetic source. Where the source is natural, the domain may be derived from any membrane bound or transmembrane protein. Transmembrane regions of particular use in this disclosure may be derived from CD8, CD28, CD3, CD45, CD4, CD5, CDS, CD9, CD 16, CD22, CD33, CD37, CD64, CD80, CD86, CD 134, CD137, CD 154, TCR. Alternatively, the transmembrane domain may be synthetic, in which case it will comprise predominantly hydrophobic residues such as leucine and valine. Preferably a triplet of phenylalanine, tryptophan and valine will be found at each end of a synthetic transmembrane domain. Optionally, a short oligo- or polypeptide linker, preferably between 2 and 10 amino acids in length may form the linkage between the transmembrane domain and the cytoplasmic signaling domain of the CAR. A glycine-serine doublet provides a particularly suitable linker.

[0696] Alternative CAR constructs may be characterized as belonging to successive generations. First-generation CARs typically consist of a single-chain variable fragment of an antibody specific for an antigen, for example comprising a VL linked to a VH of a specific antibody, linked by a flexible linker, for example by a CD8a hinge domain and a CD8a transmembrane domain, to the transmembrane and intracellular signaling domains of either CD3ζ or FcRγ (scFv-CD3ζ or scFv-FcRγ; see U.S. Pat. Nos. 7,741,465; 5,912,172; 5,906,936). Second-generation CARs incorporate the intracellular domains of one or more costimulatory molecules, such as CD28, OX40 (CD134), or 4-1BB (CD137) within the endodomain (for example scFv-CD28/OX40/4-1BB-CD3ζ; see U.S. Pat. Nos. 8,911,993; 8,916,381; 8,975,071; 9,101,584; 9,102,760; 9,102,761). Third-generation CARs include a combination of costimulatory endodomains, such a CD3ζ-chain, CD97, GDI 1a-CD18, CD2, ICOS, CD27, CD154, CDS, OX40, 4-1BB, CD2, CD7, LIGHT, LFA-1, NKG2C, B7-H3, CD30, CD40, PD-1, or CD28 signaling domains (for example scFv-CD28-4-1BB-CD3ζ or scFv-CD28-OX40-CD3ζ; see U.S. Pat. Nos. 8,906,682; 8,399,645; 5,686,281; PCT Publication No. WO2014134165; PCT Publication No. WO2012079000). In certain embodiments, the primary signaling domain comprises a functional signaling domain of a protein selected from the group consisting of CD3 zeta, CD3 gamma, CD3 delta, CD3 epsilon, common FcR gamma (FCERIG), FcR beta (Fc Epsilon Rib), CD79a, CD79b, Fc gamma RIIa, DAP10, and DAP12. In certain preferred embodiments, the primary signaling domain comprises a functional signaling domain of CD3ζ or FcRγ. In certain embodiments, the one or more costimulatory signaling domains comprise a functional signaling domain of a protein selected, each independently, from the group consisting of: CD27, CD28, 4-1BB (CD137), OX40, CD30, CD40, PD-1, ICOS, lymphocyte function-associated antigen-1 (LFA-1), CD2, CD7, LIGHT, NKG2C, B7-H3, a ligand that specifically binds with CD83, CDS, ICAM-1, GITR, BAFFR, HVEM (LIGHTR), SLAMF7, NKp80 (KLRF1), CD160, CD19, CD4, CD8 alpha, CD8 beta, IL2R beta, IL2R gamma, IL7R alpha, ITGA4, VLA1, CD49a, ITGA4, IA4, CD49D, ITGA6, VLA-6, CD49f, ITGAD, CD1 Id, ITGAE, CD103, ITGAL, CD11a, LFA-1, ITGAM, CD11b, ITGAX, CD11c, ITGB1, CD29, ITGB2, CD18, ITGB7, TNFR2, TRANCE/RANKL, DNAM1 (CD226), SLAMF4 (CD244, 2B4), CD84, CD96 (Tactile), CEACAM1, CRTAM, Ly9 (CD229), CD160 (BY55), PSGL1, CD100 (SEMA4D), CD69, SLAMF6 (NTB-A, Lyl08), SLAM (SLAMFI, CD150, IPO-3), BLAME (SLAMF8), SELPLG (CD162), LTBR, LAT, GADS, SLP-76, PAG/Cbp, NKp44, NKp30, NKp46, and NKG2D. In certain embodiments, the one or more costimulatory signaling domains comprise a functional signaling domain of a protein selected, each independently, from the group consisting of: 4-1BB, CD27, and CD28. In certain embodiments, a chimeric antigen receptor may have the design as described in U.S. Pat. No. 7,446,190, comprising an intracellular domain of CD3ζ chain (such as amino acid residues 52-163 of the human CD3 zeta chain, as shown in SEQ ID NO: 14 of U.S. Pat. No. 7,446,190), a signaling region from CD28 and an antigen-binding element (or portion or domain; such as scFv). The CD28 portion, when between the zeta chain portion and the antigen-binding element, may suitably include the transmembrane and signaling domains of CD28 (such as amino acid residues 114-220 of SEQ ID NO: 10, full sequence shown in SEQ ID NO: 6 of U.S. Pat. No. 7,446,190; these can include the following portion of CD28 as set forth in Genbank identifier NM_006139 (sequence version 1, 2 or 3): IEVMYPPPYLDNEKSNGTIIHVKGKHLCPSPLFPGPSKPFWVLVVVGGVLACYSLLVT VAFIIFWVRSKRSRLLHSDYMNMTPRRPGPTRKHYQPYAPPRDFAAYRS)) (SEQ ID NO: 42). Alternatively, when the zeta sequence lies between the CD28 sequence and the antigen-binding element, intracellular domain of CD28 can be used alone (such as amino sequence set forth in SEQ ID NO: 9 of U.S. Pat. No. 7,446,190). Hence, certain embodiments employ a CAR comprising (a) a zeta chain portion comprising the intracellular domain of human CD3ζ chain, (b) a costimulatory signaling region, and (c) an antigen-binding element (or portion or domain), wherein the costimulatory signaling region comprises the amino acid sequence encoded by SEQ ID NO: 6 of U.S. Pat. No. 7,446,190.

[0697] Alternatively, costimulation may be orchestrated by expressing CARs in antigen-specific T cells, chosen so as to be activated and expanded following engagement of their native aPTCR, for example by antigen on professional antigen-presenting cells, with attendant costimulation. In addition, additional engineered receptors may be provided on the immunoresponsive cells, for example to improve targeting of a T-cell attack and/or minimize side effects

[0698] By means of an example and without limitation, Kochenderfer et al., (2009) J Immunother. 32 (7): 689-702 described anti-CD19 chimeric antigen receptors (CAR). FMC63-28Z CAR contained a single chain variable region moiety (scFv) recognizing CD19 derived from the FMC63 mouse hybridoma (described in Nicholson et al., (1997) Molecular Immunology 34: 1157-1165), a portion of the human CD28 molecule, and the intracellular component of the human TCR-ζ molecule. FMC63-CD828BBZ CAR contained the FMC63 scFv, the hinge and transmembrane regions of the CD8 molecule, the cytoplasmic portions of CD28 and 4-1BB, and the cytoplasmic component of the TCR-(molecule. The exact sequence of the CD28 molecule included in the FMC63-28Z CAR corresponded to Genbank identifier NM_006139; the sequence included all amino acids starting with the amino acid sequence IEVMYPPPY (SEQ ID NO: 43) and continuing all the way to the carboxy-terminus of the protein. To encode the anti-CD19 scFv component of the vector, the authors designed a DNA sequence which was based on a portion of a previously published CAR (Cooper et al., (2003) Blood 101: 1637-1644). This sequence encoded the following components in frame from the 5′ end to the 3′ end: an XhoI site, the human granulocyte-macrophage colony-stimulating factor (GM-CSF) receptor α-chain signal sequence, the FMC63 light chain variable region (as in Nicholson et al., supra), a linker peptide (as in Cooper et al., supra), the FMC63 heavy chain variable region (as in Nicholson et al., supra), and a NotI site. A plasmid encoding this sequence was digested with XhoI and NotI. To form the MSGV-FMC63-28Z retroviral vector, the XhoI and NotI-digested fragment encoding the FMC63 scFv was ligated into a second XhoI and NotI-digested fragment that encoded the MSGV retroviral backbone (as in Hughes et al., (2005) Human Gene Therapy 16: 457-472) as well as part of the extracellular portion of human CD28, the entire transmembrane and cytoplasmic portion of human CD28, and the cytoplasmic portion of the human TCR-(molecule (as in Maher et al., 2002) Nature Biotechnology 20: 70-75). The FMC63-28Z CAR is included in the KTE-C19 (axicabtagene ciloleucel) anti-CD19 CAR-T therapy product in development by Kite Pharma, Inc. for the treatment of inter alia patients with relapsed/refractory aggressive B-cell non-Hodgkin lymphoma (NHL). Accordingly, in certain embodiments, cells intended for adoptive cell therapies, more particularly immunoresponsive cells such as T cells, may express the FMC63-28Z CAR as described by Kochenderfer et al. (supra). Hence, in certain embodiments, cells intended for adoptive cell therapies, more particularly immunoresponsive cells such as T cells, may comprise a CAR comprising an extracellular antigen-binding element (or portion or domain; such as scFv) that specifically binds to an antigen, an intracellular signaling domain comprising an intracellular domain of a CD3ζ chain, and a costimulatory signaling region comprising a signaling domain of CD28. Preferably, the CD28 amino acid sequence is as set forth in Genbank identifier NM_006139 (sequence version 1, 2 or 3) starting with the amino acid sequence IEVMYPPPY (SEQ ID NO: 43) and continuing all the way to the carboxy-terminus of the protein. The sequence is reproduced herein: IEVMYPPPYLDNEKSNGTIIHVKGKHLCPSPLFPGPSKPFWVLVVVGGVLACYSLLVT VAFIIFWVRSKRSRLLHSDYMNMTPRRPGPTRKHYQPYAPPRDFAAYRS (SEQ ID NO: 42). Preferably, the antigen is CD19, more preferably the antigen-binding element is an anti-CD19 scFv, even more preferably the anti-CD19 scFv as described by Kochenderfer et al. (supra).

[0699] Additional anti-CD19 CARs are further described in WO2015187528. More particularly Example 1 and Table 1 of WO2015187528, incorporated by reference herein, demonstrate the generation of anti-CD19 CARs based on a fully human anti-CD19 monoclonal antibody (47G4, as described in US20100104509) and murine anti-CD19 monoclonal antibody (as described in Nicholson et al. and explained above). Various combinations of a signal sequence (human CD8-alpha or GM-CSF receptor), extracellular and transmembrane regions (human CD8-alpha) and intracellular T-cell signaling domains (CD28-CD3ζ; 4-1BB-CD3ζ; CD27-CD3ζ; CD28-CD27-CD3ζ, 4-1BB-CD27-CD3ζ; CD27-4-1BB-CD3ζ; CD28-CD27-FcεRI gamma chain; or CD28-FcεRI gamma chain) were disclosed. Hence, in certain embodiments, cells intended for adoptive cell therapies, more particularly immunoresponsive cells such as T cells, may comprise a CAR comprising an extracellular antigen-binding element that specifically binds to an antigen, an extracellular and transmembrane region as set forth in Table 1 of WO2015187528 and an intracellular T-cell signaling domain as set forth in Table 1 of WO2015187528. Preferably, the antigen is CD19, more preferably the antigen-binding element is an anti-CD19 scFv, even more preferably the mouse or human anti-CD19 scFv as described in Example 1 of WO2015187528. In certain embodiments, the CAR comprises, consists essentially of or consists of an amino acid sequence of SEQ ID NO: 1, SEQ ID NO: 2, SEQ ID NO: 3, SEQ ID NO: 4, SEQ ID NO: 5, SEQ ID NO: 6, SEQ ID NO: 7, SEQ ID NO: 8, SEQ ID NO: 9, SEQ ID NO: 10, SEQ ID NO: 11, SEQ ID NO: 12, or SEQ ID NO: 13 as set forth in Table 1 of WO2015187528.

[0700] By means of an example and without limitation, chimeric antigen receptor that recognizes the CD70 antigen is described in WO2012058460A2 (see also, Park et al., CD70 as a target for chimeric antigen receptor T cells in head and neck squamous cell carcinoma, Oral Oncol. 2018 March; 78:145-150; and Jin et al., CD70, a novel target of CAR T-cell therapy for gliomas, Neuro Oncol. 2018 Jan. 10; 20(1):55-65). CD70 is expressed by diffuse large B-cell and follicular lymphoma and also by the malignant cells of Hodgkins lymphoma, Waldenstrom's macroglobulinemia and multiple myeloma, and by HTLV-1- and EBV-associated malignancies. (Agathanggelou et al. Am. J. Pathol. 1995; 147: 1152-1160; Hunter et al., Blood 2004; 104:4881. 26; Lens et al., J Immunol. 2005; 174:6212-6219; Baba et al., J Virol. 2008; 82:3843-3852.) In addition, CD70 is expressed by non-hematological malignancies such as renal cell carcinoma and glioblastoma. (Junker et al., J Urol. 2005; 173:2150-2153; Chahlavi et al., Cancer Res 2005; 65:5428-5438) Physiologically, CD70 expression is transient and restricted to a subset of highly activated T, B, and dendritic cells.

[0701] By means of an example and without limitation, chimeric antigen receptor that recognizes BCMA has been described (see, e.g., US20160046724A1; WO2016014789A2; WO2017211900A1; WO2015158671A1; US20180085444A1; WO2018028647A1; US20170283504A1; and WO2013154760A1).

[0702] In certain embodiments, the immune cell may, in addition to a CAR or exogenous TCR as described herein, further comprise a chimeric inhibitory receptor (inhibitory CAR) that specifically binds to a second target antigen and is capable of inducing an inhibitory or immunosuppressive or repressive signal to the cell upon recognition of the second target antigen. In certain embodiments, the chimeric inhibitory receptor comprises an extracellular antigen-binding element (or portion or domain) configured to specifically bind to a target antigen, a transmembrane domain, and an intracellular immunosuppressive or repressive signaling domain. In certain embodiments, the second target antigen is an antigen that is not expressed on the surface of a cancer cell or infected cell or the expression of which is downregulated on a cancer cell or an infected cell. In certain embodiments, the second target antigen is an MHC-class I molecule. In certain embodiments, the intracellular signaling domain comprises a functional signaling portion of an immune checkpoint molecule, such as for example PD-1 or CTLA4. Advantageously, the inclusion of such inhibitory CAR reduces the chance of the engineered immune cells attacking non-target (e.g., non-cancer) tissues.

[0703] Alternatively, T-cells expressing CARs may be further modified to reduce or eliminate expression of endogenous TCRs in order to reduce off-target effects. Reduction or elimination of endogenous TCRs can reduce off-target effects and increase the effectiveness of the T cells (U.S. Pat. No. 9,181,527). T cells stably lacking expression of a functional TCR may be produced using a variety of approaches. T cells internalize, sort, and degrade the entire T cell receptor as a complex, with a half-life of about 10 hours in resting T cells and 3 hours in stimulated T cells (von Essen, M. et al. 2004. J. Immunol. 173:384-393). Proper functioning of the TCR complex requires the proper stoichiometric ratio of the proteins that compose the TCR complex. TCR function also requires two functioning TCR zeta proteins with ITAM motifs. The activation of the TCR upon engagement of its MHC-peptide ligand requires the engagement of several TCRs on the same T cell, which all must signal properly. Thus, if a TCR complex is destabilized with proteins that do not associate properly or cannot signal optimally, the T cell will not become activated sufficiently to begin a cellular response.

[0704] Accordingly, in some embodiments, TCR expression may eliminated using RNA interference (e.g., shRNA, siRNA, miRNA, etc.), CRISPR, or other methods that target the nucleic acids encoding specific TCRs (e.g., TCR-a and TCR-P) and/or CD3 chains in primary T cells. By blocking expression of one or more of these proteins, the T cell will no longer produce one or more of the key components of the TCR complex, thereby destabilizing the TCR complex and preventing cell surface expression of a functional TCR.

[0705] In some instances, CAR may also comprise a switch mechanism for controlling expression and/or activation of the CAR. For example, a CAR may comprise an extracellular, transmembrane, and intracellular domain, in which the extracellular domain comprises a target-specific binding element that comprises a label, binding domain, or tag that is specific for a molecule other than the target antigen that is expressed on or by a target cell. In such embodiments, the specificity of the CAR is provided by a second construct that comprises a target antigen binding domain (e.g., an scFv or a bispecific antibody that is specific for both the target antigen and the label or tag on the CAR) and a domain that is recognized by or binds to the label, binding domain, or tag on the CAR. See, e.g., WO 2013/044225, WO 2016/000304, WO 2015/057834, WO 2015/057852, WO 2016/070061, U.S. Pat. No. 9,233,125, US 2016/0129109. In this way, a T-cell that expresses the CAR can be administered to a subject, but the CAR cannot bind its target antigen until the second composition comprising an antigen-specific binding domain is administered.

[0706] Alternative switch mechanisms include CARs that require multimerization in order to activate their signaling function (see, e.g., US 2015/0368342, US 2016/0175359, US 2015/0368360) and/or an exogenous signal, such as a small molecule drug (US 2016/0166613, Yung et al., Science, 2015), in order to elicit a T-cell response. Some CARs may also comprise a “suicide switch” to induce cell death of the CAR T-cells following treatment (Buddee et al., PLoS One, 2013) or to downregulate expression of the CAR following binding to the target antigen (WO 2016/011210).

[0707] Alternative techniques may be used to transform target immunoresponsive cells, such as protoplast fusion, lipofection, transfection or electroporation. A wide variety of vectors may be used, such as retroviral vectors, lentiviral vectors, adenoviral vectors, adeno-associated viral vectors, plasmids or transposons, such as a Sleeping Beauty transposon (see U.S. Pat. Nos. 6,489,458; 7,148,203; 7,160,682; 7,985,739; 8,227,432), may be used to introduce CARs, for example using 2nd generation antigen-specific CARs signaling through CD3ζ and either CD28 or CD137. Viral vectors may for example include vectors based on HIV, SV40, EBV, HSV or BPV.

[0708] Cells that are targeted for transformation may for example include T cells, Natural Killer (NK) cells, cytotoxic T lymphocytes (CTL), regulatory T cells, human embryonic stem cells, tumor-infiltrating lymphocytes (TIL) or a pluripotent stem cell from which lymphoid cells may be differentiated. T cells expressing a desired CAR may for example be selected through co-culture with γ-irradiated activating and propagating cells (AaPC), which co-express the cancer antigen and co-stimulatory molecules. The engineered CAR T-cells may be expanded, for example by co-culture on AaPC in presence of soluble factors, such as IL-2 and IL-21. This expansion may for example be carried out so as to provide memory CAR+ T cells (which may for example be assayed by non-enzymatic digital array and/or multi-panel flow cytometry). In this way, CAR T cells may be provided that have specific cytotoxic activity against antigen-bearing tumors (optionally in conjunction with production of desired chemokines such as interferon-y). CAR T cells of this kind may for example be used in animal models, for example to treat tumor xenografts.

[0709] In certain embodiments, ACT includes co-transferring CD4+Th1 cells and CD8+ CTLs to induce a synergistic antitumour response (see, e.g., Li et al., Adoptive cell therapy with CD4+T helper 1 cells and CD8+ cytotoxic T cells enhances complete rejection of an established tumour, leading to generation of endogenous memory responses to non-targeted tumour epitopes. Clin Transl Immunology. 2017 October; 6(10): e160).

[0710] In certain embodiments, Thl7 cells are transferred to a subjectin need thereof. Thl7 cells have been reported to directly eradicate melanoma tumors in mice to a greater extent than Th1 cells (Muranski P, et al., Tumor-specific Thl7-polarized cells eradicate large established melanoma. Blood. 2008 Jul. 15; 112(2):362-73; and Martin-Orozco N, et al., T helper 17 cells promote cytotoxic T cell activation in tumor immunity. Immunity. 2009 Nov. 20; 31(5):787-98). Those studies involved an adoptive T cell transfer (ACT) therapy approach, which takes advantage of CD4+ T cells that express a TCR recognizing tyrosinase tumor antigen. Exploitation of the TCR leads to rapid expansion of Thl7 populations to large numbers ex vivo for reinfusion into the autologous tumor-bearing hosts.

[0711] In certain embodiments, ACT may include autologous iPSC-based vaccines, such as irradiated iPSCs in autologous anti-tumor vaccines (see e.g., Kooreman, Nigel G. et al., Autologous iPSC-Based Vaccines Elicit Anti-tumor Responses In Vivo, Cell Stem Cell 22, 1-13, 2018, doi.org/10.1016/j.stem.2018.01.016).

[0712] Unlike T-cell receptors (TCRs) that are MHC restricted, CARs can potentially bind any cell surface-expressed antigen and can thus be more universally used to treat patients (see Irving et al., Engineering Chimeric Antigen Receptor T-Cells for Racing in Solid Tumors: Don't Forget the Fuel, Front. Immunol., 3 Apr. 2017, doi.org/10.3389/fimmu.2017.00267). In certain embodiments, in the absence of endogenous T-cell infiltrate (e.g., due to aberrant antigen processing and presentation), which precludes the use of TIL therapy and immune checkpoint blockade, the transfer of CAR T-cells may be used to treat patients (see, e.g., Hinrichs C S, Rosenberg S A. Exploiting the curative potential of adoptive T-cell therapy for cancer. Immunol Rev (2014) 257(1):56-71. doi:10.1111/imr.12132).

[0713] Approaches such as the foregoing may be adapted to provide methods of treating and/or increasing survival of a subject having a disease, such as a neoplasia, for example by administering an effective amount of an immunoresponsive cell comprising an antigen recognizing receptor that binds a selected antigen, wherein the binding activates the immunoresponsive cell, thereby treating or preventing the disease (such as a neoplasia, a pathogen infection, an autoimmune disorder, or an allogeneic transplant reaction).

[0714] In certain embodiments, the treatment can be administered after lymphodepleting pretreatment in the form of chemotherapy (typically a combination of cyclophosphamide and fludarabine) or radiation therapy. Initial studies in ACT had short lived responses and the transferred cells did not persist in vivo for very long (Houot et al., T-cell-based immunotherapy: adoptive cell transfer and checkpoint inhibition. Cancer Immunol Res (2015) 3(10):1115-22; and Kamta et al., Advancing Cancer Therapy with Present and Emerging Immuno-Oncology Approaches. Front. Oncol. (2017) 7:64). Immune suppressor cells like Tregs and MDSCs may attenuate the activity of transferred cells by outcompeting them for the necessary cytokines. Not being bound by a theory lymphodepleting pretreatment may eliminate the suppressor cells allowing the TILs to persist.

[0715] In one embodiment, the treatment can be administrated into patients undergoing an immunosuppressive treatment (e.g., glucocorticoid treatment). The cells or population of cells, may be made resistant to at least one immunosuppressive agent due to the inactivation of a gene encoding a receptor for such immunosuppressive agent. In certain embodiments, the immunosuppressive treatment provides for the selection and expansion of the immunoresponsive T cells within the patient.

[0716] In certain embodiments, the treatment can be administered before primary treatment (e.g., surgery or radiation therapy) to shrink a tumor before the primary treatment. In another embodiment, the treatment can be administered after primary treatment to remove any remaining cancer cells.

[0717] In certain embodiments, immunometabolic barriers can be targeted therapeutically prior to and/or during ACT to enhance responses to ACT or CAR T-cell therapy and to support endogenous immunity (see, e.g., Irving et al., Engineering Chimeric Antigen Receptor T-Cells for Racing in Solid Tumors: Don't Forget the Fuel, Front. Immunol., 3 Apr. 2017, doi.org/10.3389/fimmu.2017.00267).

[0718] The administration of cells or population of cells, such as immune system cells or cell populations, such as more particularly immunoresponsive cells or cell populations, as disclosed herein may be carried out in any convenient manner, including by aerosol inhalation, injection, ingestion, transfusion, implantation or transplantation. The cells or population of cells may be administered to a patient subcutaneously, intradermally, intratumorally, intranodally, intramedullary, intramuscularly, intrathecally, by intravenous or intralymphatic injection, or intraperitoneally. In some embodiments, the disclosed CARs may be delivered or administered into a cavity formed by the resection of tumor tissue (i.e. intracavity delivery) or directly into a tumor prior to resection (i.e. intratumoral delivery). In one embodiment, the cell compositions of the present invention are preferably administered by intravenous injection.

[0719] The administration of the cells or population of cells can consist of the administration of 104-109 cells per kg body weight, preferably 105 to 106 cells/kg body weight including all integer values of cell numbers within those ranges. Dosing in CAR T cell therapies may for example involve administration of from 106 to 109 cells/kg, with or without a course of lymphodepletion, for example with cyclophosphamide. The cells or population of cells can be administrated in one or more doses. In another embodiment, the effective amount of cells are administrated as a single dose. In another embodiment, the effective amount of cells are administrated as more than one dose over a period time. Timing of administration is within the judgment of managing physician and depends on the clinical condition of the patient. The cells or population of cells may be obtained from any source, such as a blood bank or a donor. While individual needs vary, determination of optimal ranges of effective amounts of a given cell type for a particular disease or conditions are within the skill of one in the art. An effective amount means an amount which provides a therapeutic or prophylactic benefit. The dosage administrated will be dependent upon the age, health and weight of the recipient, kind of concurrent treatment, if any, frequency of treatment and the nature of the effect desired.

[0720] In another embodiment, the effective amount of cells or composition comprising those cells are administrated parenterally. The administration can be an intravenous administration. The administration can be directly done by injection within a tumor.

[0721] To guard against possible adverse reactions, engineered immunoresponsive cells may be equipped with a transgenic safety switch, in the form of a transgene that renders the cells vulnerable to exposure to a specific signal. For example, the herpes simplex viral thymidine kinase (TK) gene may be used in this way, for example by introduction into allogeneic T lymphocytes used as donor lymphocyte infusions following stem cell transplantation (Greco, et al., Improving the safety of cell therapy with the TK-suicide gene. Front. Pharmacol. 2015; 6: 95). In such cells, administration of a nucleoside prodrug such as ganciclovir or acyclovir causes cell death. Alternative safety switch constructs include inducible caspase 9, for example triggered by administration of a small-molecule dimerizer that brings together two nonfunctional icasp9 molecules to form the active enzyme. A wide variety of alternative approaches to implementing cellular proliferation controls have been described (see U.S. Patent Publication No. 20130071414; PCT Patent Publication WO2011146862; PCT Patent Publication WO2014011987; PCT Patent Publication WO2013040371; Zhou et al. BLOOD, 2014, 123/25:3895-3905; Di Stasi et al., The New England Journal of Medicine 2011; 365:1673-1683; Sadelain M, The New England Journal of Medicine 2011; 365:1735-173; Ramos et al., Stem Cells 28(6):1107-15 (2010)).

[0722] In a further refinement of adoptive therapies, genome editing may be used to tailor immunoresponsive cells to alternative implementations, for example providing edited CAR T cells (see Poirot et al., 2015, Multiplex genome edited T-cell manufacturing platform for “off-the-shelf” adoptive T-cell immunotherapies, Cancer Res 75 (18): 3853; Ren et al., 2017, Multiplex genome editing to generate universal CAR T cells resistant to PD1 inhibition, Clin Cancer Res. 2017 May 1; 23(9):2255-2266. doi: 10.1158/1078-0432.CCR-16-1300. Epub 2016 Nov. 4; Qasim et al., 2017, Molecular remission of infant B-ALL after infusion of universal TALEN gene-edited CAR T cells, Sci Transl Med. 2017 Jan. 25; 9(374); Legut, et al., 2018, CRISPR-mediated TCR replacement generates superior anticancer transgenic T cells. Blood, 131(3), 311-322; and Georgiadis et al., Long Terminal Repeat CRISPR-CAR-Coupled “Universal” T Cells Mediate Potent Anti-leukemic Effects, Molecular Therapy, In Press, Corrected Proof, Available online 6 Mar. 2018). Cells may be edited using any CRISPR system and method of use thereof as described herein. The composition and systems may be delivered to an immune cell by any method described herein. In preferred embodiments, cells are edited ex vivo and transferred to a subject in need thereof. Immunoresponsive cells, CAR T cells or any cells used for adoptive cell transfer may be edited. Editing may be performed for example to insert or knock-in an exogenous gene, such as an exogenous gene encoding a CAR or a TCR, at a preselected locus in a cell (e.g. TRAC locus); to eliminate potential alloreactive T-cell receptors (TCR) or to prevent inappropriate pairing between endogenous and exogenous TCR chains, such as to knock-out or knock-down expression of an endogenous TCR in a cell; to disrupt the target of a chemotherapeutic agent in a cell; to block an immune checkpoint, such as to knock-out or knock-down expression of an immune checkpoint protein or receptor in a cell; to knock-out or knock-down expression of other gene or genes in a cell, the reduced expression or lack of expression of which can enhance the efficacy of adoptive therapies using the cell; to knock-out or knock-down expression of an endogenous gene in a cell, said endogenous gene encoding an antigen targeted by an exogenous CAR or TCR; to knock-out or knock-down expression of one or more MHC constituent proteins in a cell; to activate a T cell; to modulate cells such that the cells are resistant to exhaustion or dysfunction; and/or increase the differentiation and/or proliferation of functionally exhausted or dysfunctional CD8+ T-cells (see PCT Patent Publications: WO2013176915, WO2014059173, WO2014172606, WO2014184744, and WO2014191128).

[0723] In certain embodiments, editing may result in inactivation of a gene. By inactivating a gene, it is intended that the gene of interest is not expressed in a functional protein form. In a particular embodiment, the system specifically catalyzes cleavage in one targeted gene thereby inactivating said targeted gene. The nucleic acid strand breaks caused are commonly repaired through the distinct mechanisms of homologous recombination or non-homologous end joining (NHEJ). However, NHEJ is an imperfect repair process that often results in changes to the DNA sequence at the site of the cleavage. Repair via non-homologous end joining (NHEJ) often results in small insertions or deletions (Indel) and can be used for the creation of specific gene knockouts. Cells in which a cleavage induced mutagenesis event has occurred can be identified and/or selected by well-known methods in the art. In certain embodiments, homology directed repair (HDR) is used to concurrently inactivate a gene (e.g., TRAC) and insert an endogenous TCR or CAR into the inactivated locus.

[0724] Hence, in certain embodiments, editing of cells, particularly cells intended for adoptive cell therapies, more particularly immunoresponsive cells such as T cells, may be performed to insert or knock-in an exogenous gene, such as an exogenous gene encoding a CAR or a TCR, at a preselected locus in a cell. Conventionally, nucleic acid molecules encoding CARs or TCRs are transfected or transduced to cells using randomly integrating vectors, which, depending on the site of integration, may lead to clonal expansion, oncogenic transformation, variegated transgene expression and/or transcriptional silencing of the transgene. Directing of transgene(s) to a specific locus in a cell can minimize or avoid such risks and advantageously provide for uniform expression of the transgene(s) by the cells. Without limitation, suitable ‘safe harbor’ loci for directed transgene integration include CCR5 or AAVS1. Homology-directed repair (HDR) strategies are known and described elsewhere in this specification allowing to insert transgenes into desired loci (e.g., TRAC locus).

[0725] Further suitable loci for insertion of transgenes, in particular CAR or exogenous TCR transgenes, include without limitation loci comprising genes coding for constituents of endogenous T-cell receptor, such as T-cell receptor alpha locus (TRA) or T-cell receptor beta locus (TRB), for example T-cell receptor alpha constant (TRAC) locus, T-cell receptor beta constant 1 (TRBC1) locus or T-cell receptor beta constant 2 (TRBC1) locus. Advantageously, insertion of a transgene into such locus can simultaneously achieve expression of the transgene, potentially controlled by the endogenous promoter, and knock-out expression of the endogenous TCR. This approach has been exemplified in Eyquem et al., (2017) Nature 543: 113-117, wherein the authors used CRISPR/Cas9 gene editing to knock-in a DNA molecule encoding a CD19-specific CAR into the TRAC locus downstream of the endogenous promoter; the CAR-T cells obtained by CRISPR were significantly superior in terms of reduced tonic CAR signaling and exhaustion.

[0726] T cell receptors (TCR) are cell surface receptors that participate in the activation of T cells in response to the presentation of antigen. The TCR is generally made from two chains, α and β, which assemble to form a heterodimer and associates with the CD3-transducing subunits to form the T cell receptor complex present on the cell surface. Each α and β chain of the TCR consists of an immunoglobulin-like N-terminal variable (V) and constant (C) region, a hydrophobic transmembrane domain, and a short cytoplasmic region. As for immunoglobulin molecules, the variable region of the α and β chains are generated by V(D)J recombination, creating a large diversity of antigen specificities within the population of T cells. However, in contrast to immunoglobulins that recognize intact antigen, T cells are activated by processed peptide fragments in association with an MHC molecule, introducing an extra dimension to antigen recognition by T cells, known as MHC restriction. Recognition of MHC disparities between the donor and recipient through the T cell receptor leads to T cell proliferation and the potential development of graft versus host disease (GVHD). The inactivation of TCRa or TCRP can result in the elimination of the TCR from the surface of T cells preventing recognition of alloantigen and thus GVHD. However, TCR disruption generally results in the elimination of the CD3 signaling component and alters the means of further T cell expansion.

[0727] Hence, in certain embodiments, editing of cells, particularly cells intended for adoptive cell therapies, more particularly immunoresponsive cells such as T cells, may be performed to knock-out or knock-down expression of an endogenous TCR in a cell. For example, NHEJ-based or HDR-based gene editing approaches can be employed to disrupt the endogenous TCR alpha and/or beta chain genes. For example, gene editing system or systems, such as CRISPR/Cas system or systems, can be designed to target a sequence found within the TCR beta chain conserved between the beta 1 and beta 2 constant region genes (TRBC1 and TRBC2) and/or to target the constant region of the TCR alpha chain (TRAC) gene.

[0728] Allogeneic cells are rapidly rejected by the host immune system. It has been demonstrated that, allogeneic leukocytes present in non-irradiated blood products will persist for no more than 5 to 6 days (Boni, Muranski et al. 2008 Blood 1; 112(12):4746-54). Thus, to prevent rejection of allogeneic cells, the host's immune system usually has to be suppressed to some extent. However, in the case of adoptive cell transfer the use of immunosuppressive drugs also have a detrimental effect on the introduced therapeutic T cells. Therefore, to effectively use an adoptive immunotherapy approach in these conditions, the introduced cells would need to be resistant to the immunosuppressive treatment. Thus, in a particular embodiment, the present invention further comprises a step of modifying T cells to make them resistant to an immunosuppressive agent, preferably by inactivating at least one gene encoding a target for an immunosuppressive agent. An immunosuppressive agent is an agent that suppresses immune function by one of several mechanisms of action. An immunosuppressive agent can be, but is not limited to a calcineurin inhibitor, a target of rapamycin, an interleukin-2 receptor α-chain blocker, an inhibitor of inosine monophosphate dehydrogenase, an inhibitor of dihydrofolic acid reductase, a corticosteroid or an immunosuppressive antimetabolite. The present invention allows conferring immunosuppressive resistance to T cells for immunotherapy by inactivating the target of the immunosuppressive agent in T cells. As non-limiting examples, targets for an immunosuppressive agent can be a receptor for an immunosuppressive agent such as: CD52, glucocorticoid receptor (GR), a FKBP family gene member and a cyclophilin family gene member.

[0729] In certain embodiments, editing of cells, particularly cells intended for adoptive cell therapies, more particularly immunoresponsive cells such as T cells, may be performed to block an immune checkpoint, such as to knock-out or knock-down expression of an immune checkpoint protein or receptor in a cell. Immune checkpoints are inhibitory pathways that slow down or stop immune reactions and prevent excessive tissue damage from uncontrolled activity of immune cells. In certain embodiments, the immune checkpoint targeted is the programmed death-1 (PD-1 or CD279) gene (PDCD1). In other embodiments, the immune checkpoint targeted is cytotoxic T-lymphocyte-associated antigen (CTLA-4). In additional embodiments, the immune checkpoint targeted is another member of the CD28 and CTLA4 Ig superfamily such as BTLA, LAG3, ICOS, PDL1 or KIR. In further additional embodiments, the immune checkpoint targeted is a member of the TNFR superfamily such as CD40, OX40, CD137, GITR, CD27 or TIM-3.

[0730] Additional immune checkpoints include Src homology 2 domain-containing protein tyrosine phosphatase 1 (SHP-1) (Watson H A, et al., SHP-1: the next checkpoint target for cancer immunotherapy? Biochem Soc Trans. 2016 Apr. 15; 44(2):356-62). SHP-1 is a widely expressed inhibitory protein tyrosine phosphatase (PTP). In T-cells, it is a negative regulator of antigen-dependent activation and proliferation. It is a cytosolic protein, and therefore not amenable to antibody-mediated therapies, but its role in activation and proliferation makes it an attractive target for genetic manipulation in adoptive transfer strategies, such as chimeric antigen receptor (CAR) T cells. Immune checkpoints may also include T cell immunoreceptor with Ig and ITIM domains (TIGIT/Vstm3/WUCAM/VSIG9) and VISTA (Le Mercier I, et al., (2015) Beyond CTLA-4 and PD-1, the generation Z of negative checkpoint regulators. Front. Immunol. 6:418).

[0731] International Patent Publication No. WO2014172606 relates to the use of MT1 and/or MT2 inhibitors to increase proliferation and/or activity of exhausted CD8+ T-cells and to decrease CD8+ T-cell exhaustion (e.g., decrease functionally exhausted or unresponsive CD8+ immune cells). In certain embodiments, metallothioneins are targeted by gene editing in adoptively transferred T cells.

[0732] In certain embodiments, targets of gene editing may be at least one targeted locus involved in the expression of an immune checkpoint protein. Such targets may include, but are not limited to CTLA4, PPP2CA, PPP2CB, PTPN6, PTPN22, PDCD1, ICOS (CD278), PDL1, KIR, LAG3, HAVCR2, BTLA, CD160, TIGIT, CD96, CRTAM, LAIR1, SIGLEC7, SIGLEC9, CD244 (2B4), TNFRSF10B, TNFRSF10A, CASP8, CASP10, CASP3, CASP6, CASP7, FADD, FAS, TGFBRII, TGFRBRI, SMAD2, SMAD3, SMAD4, SMAD10, SKI, SKIL, TGIF1, IL10RA, IL10RB, HMOX2, IL6R, IL6ST, EIF2AK4, CSK, PAG1, SIT1, FOXP3, PRDM1, BATF, VISTA, GUCYlA2, GUCYlA3, GUCYlB2, GUCYlB3, MT1, MT2, CD40, OX40, CD137, GITR, CD27, SHP-1, TIM-3, CEACAM-1, CEACAM-3, or CEACAM-5. In preferred embodiments, the gene locus involved in the expression of PD-1 or CTLA-4 genes is targeted. In other preferred embodiments, combinations of genes are targeted, such as but not limited to PD-1 and TIGIT.

[0733] By means of an example and without limitation, WO2016196388 concerns an engineered T cell comprising (a) a genetically engineered antigen receptor that specifically binds to an antigen, which receptor may be a CAR; and (b) a disrupted gene encoding a PD-L1, an agent for disruption of a gene encoding a PD-L1, and/or disruption of a gene encoding PD-L1, wherein the disruption of the gene may be mediated by a gene editing nuclease, a zinc finger nuclease (ZFN), CRISPR/Cas9 and/or TALEN. WO2015142675 relates to immune effector cells comprising a CAR in combination with an agent (such as the composition or system herein) that increases the efficacy of the immune effector cells in the treatment of cancer, wherein the agent may inhibit an immune inhibitory molecule, such as PD1, PD-L1, CTLA-4, TIM-3, LAG-3, VISTA, BTLA, TIGIT, LAIR1, CD160, 2B4, TGFR beta, CEACAM-1, CEACAM-3, or CEACAM-5. Ren et al., (2017) Clin Cancer Res 23 (9) 2255-2266 performed lentiviral delivery of CAR and electro-transfer of Cas9 mRNA and gRNAs targeting endogenous TCR, 3-2 microglobulin (B2M) and PD1 simultaneously, to generate gene-disrupted allogeneic CAR T cells deficient of TCR, HLA class I molecule and PD1.

[0734] In certain embodiments, cells may be engineered to express a CAR, wherein expression and/or function of methylcytosine dioxygenase genes (TET1, TET2 and/or TET3) in the cells has been reduced or eliminated, (such as the composition or system herein) (for example, as described in WO201704916).

[0735] In certain embodiments, editing of cells, particularly cells intended for adoptive cell therapies, more particularly immunoresponsive cells such as T cells, may be performed to knock-out or knock-down expression of an endogenous gene in a cell, said endogenous gene encoding an antigen targeted by an exogenous CAR or TCR, thereby reducing the likelihood of targeting of the engineered cells. In certain embodiments, the targeted antigen may be one or more antigen selected from the group consisting of CD38, CD138, CS-1, CD33, CD26, CD30, CD53, CD92, CD100, CD148, CD150, CD200, CD261, CD262, CD362, human telomerase reverse transcriptase (hTERT), survivin, mouse double minute 2 homolog (MDM2), cytochrome P450 1B1 (CYP1B), HER2/neu, Wilms' tumor gene 1 (WTi), livin, alphafetoprotein (AFP), carcinoembryonic antigen (CEA), mucin 16 (MUC16), MUC1, prostate-specific membrane antigen (PSMA), p53, cyclin (D1), B cell maturation antigen (BCMA), transmembrane activator and CAML Interactor (TACI), and B-cell activating factor receptor (BAFF-R) (for example, as described in WO2016011210 and WO2017011804).

[0736] In certain embodiments, editing of cells, particularly cells intended for adoptive cell therapies, more particularly immunoresponsive cells such as T cells, may be performed to knock-out or knock-down expression of one or more MHC constituent proteins, such as one or more HLA proteins and/or beta-2 microglobulin (B2M), in a cell, whereby rejection of non-autologous (e.g., allogeneic) cells by the recipient's immune system can be reduced or avoided. In preferred embodiments, one or more HLA class I proteins, such as HLA-A, B and/or C, and/or B2M may be knocked-out or knocked-down. Preferably, B2M may be knocked-out or knocked-down. By means of an example, Ren et al., (2017) Clin Cancer Res 23 (9) 2255-2266 performed lentiviral delivery of CAR and electro-transfer of Cas9 mRNA and gRNAs targeting endogenous TCR, β-2 microglobulin (B2M) and PD1 simultaneously, to generate gene-disrupted allogeneic CAR T cells deficient of TCR, HLA class I molecule and PD1.

[0737] In other embodiments, at least two genes are edited. Pairs of genes may include, but are not limited to PD1 and TCRα, PD1 and TCRβ, CTLA-4 and TCRα, CTLA-4 and TCRβ, LAG3 and TCRα, LAG3 and TCRβ, Tim3 and TCRα, Tim3 and TCRβ, BTLA and TCRα, BTLA and TCRβ, BY55 and TCRα, BY55 and TCRβ, TIGIT and TCRα, TIGIT and TCRβ, B7H5 and TCRα, B7H5 and TCRβ, LAIR1 and TCRα, LAIR1 and TCRβ, SIGLEC10 and TCRα, SIGLEC10 and TCRβ, 2B4 and TCRα, 2B4 and TCRβ, B2M and TCRα, B2M and TCRβ.

[0738] In certain embodiments, a cell may be multiplied edited (multiplex genome editing) as taught herein to (1) knock-out or knock-down expression of an endogenous TCR (for example, TRBC1, TRBC2 and/or TRAC), (2) knock-out or knock-down expression of an immune checkpoint protein or receptor (for example PD1, PD-L1 and/or CTLA4); and (3) knock-out or knock-down expression of one or more MHC constituent proteins (for example, HLA-A, B and/or C, and/or B2M, preferably B2M).

[0739] Whether prior to or after genetic modification of the T cells, the T cells can be activated and expanded generally using methods as described, for example, in U.S. Pat. Nos. 6,352,694; 6,534,055; 6,905,680; 5,858,358; 6,887,466; 6,905,681; 7,144,575; 7,232,566; 7,175,843; 5,883,223; 6,905,874; 6,797,514; 6,867,041; and 7,572,631. T cells can be expanded in vitro or in vivo.

[0740] Immune cells may be obtained using any method known in the art. In one embodiment, allogenic T cells may be obtained from healthy subjects. In one embodiment T cells that have infiltrated a tumor are isolated. T cells may be removed during surgery. T cells may be isolated after removal of tumor tissue by biopsy. T cells may be isolated by any means known in the art. In one embodiment, T cells are obtained by apheresis. In one embodiment, the method may comprise obtaining a bulk population of T cells from a tumor sample by any suitable method known in the art. For example, a bulk population of T cells can be obtained from a tumor sample by dissociating the tumor sample into a cell suspension from which specific cell populations can be selected. Suitable methods of obtaining a bulk population of T cells may include, but are not limited to, any one or more of mechanically dissociating (e.g., mincing) the tumor, enzymatically dissociating (e.g., digesting) the tumor, and aspiration (e.g., as with a needle).

[0741] The bulk population of T cells obtained from a tumor sample may comprise any suitable type of T cell. Preferably, the bulk population of T cells obtained from a tumor sample comprises tumor infiltrating lymphocytes (TILs).

[0742] The tumor sample may be obtained from any mammal. Unless stated otherwise, as used herein, the term “mammal” refers to any mammal including, but not limited to, mammals of the order Logomorpha, such as rabbits; the order Carnivora, including Felines (cats) and Canines (dogs); the order Artiodactyla, including Bovines (cows) and Swines (pigs); or of the order Perssodactyla, including Equines (horses). The mammals may be non-human primates, e.g., of the order Primates, Ceboids, or Simoids (monkeys) or of the order Anthropoids (humans and apes). In some embodiments, the mammal may be a mammal of the order Rodentia, such as mice and hamsters. Preferably, the mammal is a non-human primate or a human. An especially preferred mammal is the human.

[0743] T cells can be obtained from a number of sources, including peripheral blood mononuclear cells (PBMC), bone marrow, lymph node tissue, spleen tissue, and tumors. In certain embodiments of the present invention, T cells can be obtained from a unit of blood collected from a subject using any number of techniques known to the skilled artisan, such as Ficoll separation. In one preferred embodiment, cells from the circulating blood of an individual are obtained by apheresis or leukapheresis. The apheresis product typically contains lymphocytes, including T cells, monocytes, granulocytes, B cells, other nucleated white blood cells, red blood cells, and platelets. In one embodiment, the cells collected by apheresis may be washed to remove the plasma fraction and to place the cells in an appropriate buffer or media for subsequent processing steps. In one embodiment of the invention, the cells are washed with phosphate buffered saline (PBS). In an alternative embodiment, the wash solution lacks calcium and may lack magnesium or may lack many if not all divalent cations. Initial activation steps in the absence of calcium lead to magnified activation. As those of ordinary skill in the art would readily appreciate a washing step may be accomplished by methods known to those in the art, such as by using a semi-automated “flow-through” centrifuge (for example, the Cobe 2991 cell processor) according to the manufacturer's instructions. After washing, the cells may be resuspended in a variety of biocompatible buffers, such as, for example, Ca-free, Mg-free PBS. Alternatively, the undesirable components of the apheresis sample may be removed and the cells directly resuspended in culture media.

[0744] In another embodiment, T cells are isolated from peripheral blood lymphocytes by lysing the red blood cells and depleting the monocytes, for example, by centrifugation through a PERCOLL™ gradient. A specific subpopulation of T cells, such as CD28+, CD4+, CDC, CD45RA+, and CD45RO+ T cells, can be further isolated by positive or negative selection techniques. For example, in one preferred embodiment, T cells are isolated by incubation with anti-CD3/anti-CD28 (i.e., 3×28)-conjugated beads, such as DYNABEADS® M-450 CD3/CD28 T, or XCYTE DYNABEADS™ for a time period sufficient for positive selection of the desired T cells. In one embodiment, the time period is about 30 minutes. In a further embodiment, the time period ranges from 30 minutes to 36 hours or longer and all integer values there between. In a further embodiment, the time period is at least 1, 2, 3, 4, 5, or 6 hours. In yet another preferred embodiment, the time period is 10 to 24 hours. In one preferred embodiment, the incubation time period is 24 hours. For isolation of T cells from patients with leukemia, use of longer incubation times, such as 24 hours, can increase cell yield. Longer incubation times may be used to isolate T cells in any situation where there are few T cells as compared to other cell types, such in isolating tumor infiltrating lymphocytes (TIL) from tumor tissue or from immunocompromised individuals. Further, use of longer incubation times can increase the efficiency of capture of CD8+ T cells.

[0745] Enrichment of a T cell population by negative selection can be accomplished with a combination of antibodies directed to surface markers unique to the negatively selected cells. A preferred method is cell sorting and/or selection via negative magnetic immunoadherence or flow cytometry that uses a cocktail of monoclonal antibodies directed to cell surface markers present on the cells negatively selected. For example, to enrich for CD4+ cells by negative selection, a monoclonal antibody cocktail typically includes antibodies to CD14, CD20, CD11b, CD16, HLA-DR, and CD8.

[0746] Further, monocyte populations (e.g., CD14+ cells) may be depleted from blood preparations by a variety of methodologies, including anti-CD14 coated beads or columns, or utilization of the phagocytotic activity of these cells to facilitate removal. Accordingly, in one embodiment, the invention uses paramagnetic particles of a size sufficient to be engulfed by phagocytotic monocytes. In certain embodiments, the paramagnetic particles are commercially available beads, for example, those produced by Life Technologies under the trade name Dynabeads™. In one embodiment, other non-specific cells are removed by coating the paramagnetic particles with “irrelevant” proteins (e.g., serum proteins or antibodies). Irrelevant proteins and antibodies include those proteins and antibodies or fragments thereof that do not specifically target the T cells to be isolated. In certain embodiments, the irrelevant beads include beads coated with sheep anti-mouse antibodies, goat anti-mouse antibodies, and human serum albumin.

[0747] In brief, such depletion of monocytes is performed by preincubating T cells isolated from whole blood, apheresed peripheral blood, or tumors with one or more varieties of irrelevant or non-antibody coupled paramagnetic particles at any amount that allows for removal of monocytes (approximately a 20:1 bead:cell ratio) for about 30 minutes to 2 hours at 22 to 37 degrees C., followed by magnetic removal of cells which have attached to or engulfed the paramagnetic particles. Such separation can be performed using standard methods available in the art. For example, any magnetic separation methodology may be used including a variety of which are commercially available, (e.g., DYNAL® Magnetic Particle Concentrator (DYNAL MPC®)). Assurance of requisite depletion can be monitored by a variety of methodologies known to those of ordinary skill in the art, including flow cytometric analysis of CD14 positive cells, before and after depletion.

[0748] For isolation of a desired population of cells by positive or negative selection, the concentration of cells and surface (e.g., particles such as beads) can be varied. In certain embodiments, it may be desirable to significantly decrease the volume in which beads and cells are mixed together (i.e., increase the concentration of cells), to ensure maximum contact of cells and beads. For example, in one embodiment, a concentration of 2 billion cells/ml is used. In one embodiment, a concentration of 1 billion cells/ml is used. In a further embodiment, greater than 100 million cells/ml is used. In a further embodiment, a concentration of cells of 10, 15, 20, 25, 30, 35, 40, 45, or 50 million cells/ml is used. In yet another embodiment, a concentration of cells from 75, 80, 85, 90, 95, or 100 million cells/ml is used. In further embodiments, concentrations of 125 or 150 million cells/ml can be used. Using high concentrations can result in increased cell yield, cell activation, and cell expansion. Further, use of high cell concentrations allows more efficient capture of cells that may weakly express target antigens of interest, such as CD28-negative T cells, or from samples where there are many tumor cells present (i.e., leukemic blood, tumor tissue, etc.). Such populations of cells may have therapeutic value and would be desirable to obtain. For example, using high concentration of cells allows more efficient selection of CD8+ T cells that normally have weaker CD28 expression.

[0749] In a related embodiment, it may be desirable to use lower concentrations of cells. By significantly diluting the mixture of T cells and surface (e.g., particles such as beads), interactions between the particles and cells is minimized. This selects for cells that express high amounts of desired antigens to be bound to the particles. For example, CD4+ T cells express higher levels of CD28 and are more efficiently captured than CD8+ T cells in dilute concentrations. In one embodiment, the concentration of cells used is 5×106/ml. In other embodiments, the concentration used can be from about 1×105/ml to 1×106/ml, and any integer value in between.

[0750] T cells can also be frozen. Wishing not to be bound by theory, the freeze and subsequent thaw step provides a more uniform product by removing granulocytes and to some extent monocytes in the cell population. After a washing step to remove plasma and platelets, the cells may be suspended in a freezing solution. While many freezing solutions and parameters are known in the art and will be useful in this context, one method involves using PBS containing 20% DMSO and 8% human serum albumin, or other suitable cell freezing media, the cells then are frozen to −80° C. at a rate of 1° per minute and stored in the vapor phase of a liquid nitrogen storage tank. Other methods of controlled freezing may be used as well as uncontrolled freezing immediately at −20° C. or in liquid nitrogen.

[0751] T cells for use in the present invention may also be antigen-specific T cells. For example, tumor-specific T cells can be used. In certain embodiments, antigen-specific T cells can be isolated from a patient of interest, such as a patient afflicted with a cancer or an infectious disease. In one embodiment, neoepitopes are determined for a subject and T cells specific to these antigens are isolated. Antigen-specific cells for use in expansion may also be generated in vitro using any number of methods known in the art, for example, as described in U.S. Patent Publication No. US 20040224402 entitled, Generation and Isolation of Antigen-Specific T Cells, or in U.S. Pat. No. 6,040,177. Antigen-specific cells for use in the present invention may also be generated using any number of methods known in the art, for example, as described in Current Protocols in Immunology, or Current Protocols in Cell Biology, both published by John Wiley & Sons, Inc., Boston, Mass.

[0752] In a related embodiment, it may be desirable to sort or otherwise positively select (e.g. via magnetic selection) the antigen specific cells prior to or following one or two rounds of expansion. Sorting or positively selecting antigen-specific cells can be carried out using peptide-MHC tetramers (Altman, et al., Science. 1996 Oct. 4; 274(5284):94-6). In another embodiment, the adaptable tetramer technology approach is used (Andersen et al., 2012 Nat Protoc. 7:891-902). Tetramers are limited by the need to utilize predicted binding peptides based on prior hypotheses, and the restriction to specific HLAs. Peptide-MHC tetramers can be generated using techniques known in the art and can be made with any MHC molecule of interest and any antigen of interest as described herein. Specific epitopes to be used in this context can be identified using numerous assays known in the art. For example, the ability of a polypeptide to bind to MHC class I may be evaluated indirectly by monitoring the ability to promote incorporation of 1251 labeled 02-microglobulin (02m) into MHC class I/02m/peptide heterotrimeric complexes (see Parker et al., J. Immunol. 152:163, 1994).

[0753] In one embodiment cells are directly labeled with an epitope-specific reagent for isolation by flow cytometry followed by characterization of phenotype and TCRs. In one embodiment, T cells are isolated by contacting with T cell specific antibodies. Sorting of antigen-specific T cells, or generally any cells of the present invention, can be carried out using any of a variety of commercially available cell sorters, including, but not limited to, MoFlo sorter (DakoCytomation, Fort Collins, Colo.), FACSAria™, FACSArray™, FACSVantage™ BD™ LSR II, and FACSCalibur™ (BD Biosciences, San Jose, Calif.).

[0754] In a preferred embodiment, the method comprises selecting cells that also express CD3. The method may comprise specifically selecting the cells in any suitable manner. Preferably, the selecting is carried out using flow cytometry. The flow cytometry may be carried out using any suitable method known in the art. The flow cytometry may employ any suitable antibodies and stains. Preferably, the antibody is chosen such that it specifically recognizes and binds to the particular biomarker being selected. For example, the specific selection of CD3, CD8, TIM-3, LAG-3, 4-1BB, or PD-1 may be carried out using anti-CD3, anti-CD8, anti-TIM-3, anti-LAG-3, anti-4-1BB, or anti-PD-1 antibodies, respectively. The antibody or antibodies may be conjugated to a bead (e.g., a magnetic bead) or to a fluorochrome. Preferably, the flow cytometry is fluorescence-activated cell sorting (FACS). TCRs expressed on T cells can be selected based on reactivity to autologous tumors. Additionally, T cells that are reactive to tumors can be selected for based on markers using the methods described in patent publication Nos. WO2014133567 and WO2014133568, herein incorporated by reference in their entirety. Additionally, activated T cells can be selected for based on surface expression of CD107a.

[0755] In one embodiment of the invention, the method further comprises expanding the numbers of T cells in the enriched cell population. Such methods are described in U.S. Pat. No. 8,637,307 and is herein incorporated by reference in its entirety. The numbers of T cells may be increased at least about 3-fold (or 4-, 5-, 6-, 7-, 8-, or 9-fold), more preferably at least about 10-fold (or 20-, 30-, 40-, 50-, 60-, 70-, 80-, or 90-fold), more preferably at least about 100-fold, more preferably at least about 1,000-fold, or most preferably at least about 100,000-fold. The numbers of T cells may be expanded using any suitable method known in the art. Exemplary methods of expanding the numbers of cells are described in patent publication No. WO 2003057171, U.S. Pat. No. 8,034,334, and U.S. Patent Application Publication No. 2012/0244133, each of which is incorporated herein by reference.

[0756] In one embodiment, ex vivo T cell expansion can be performed by isolation of T cells and subsequent stimulation or activation followed by further expansion. In one embodiment of the invention, the T cells may be stimulated or activated by a single agent. In another embodiment, T cells are stimulated or activated with two agents, one that induces a primary signal and a second that is a co-stimulatory signal. Ligands useful for stimulating a single signal or stimulating a primary signal and an accessory molecule that stimulates a second signal may be used in soluble form. Ligands may be attached to the surface of a cell, to an Engineered Multivalent Signaling Platform (EMSP), or immobilized on a surface. In a preferred embodiment both primary and secondary agents are co-immobilized on a surface, for example a bead or a cell. In one embodiment, the molecule providing the primary activation signal may be a CD3 ligand, and the co-stimulatory molecule may be a CD28 ligand or 4-1BB ligand.

[0757] In certain embodiments, T cells comprising a CAR or an exogenous TCR, may be manufactured as described in WO2015120096, by a method comprising: enriching a population of lymphocytes obtained from a donor subject; stimulating the population of lymphocytes with one or more T-cell stimulating agents to produce a population of activated T cells, wherein the stimulation is performed in a closed system using serum-free culture medium; transducing the population of activated T cells with a viral vector comprising a nucleic acid molecule which encodes the CAR or TCR, using a single cycle transduction to produce a population of transduced T cells, wherein the transduction is performed in a closed system using serum-free culture medium; and expanding the population of transduced T cells for a predetermined time to produce a population of engineered T cells, wherein the expansion is performed in a closed system using serum-free culture medium. In certain embodiments, T cells comprising a CAR or an exogenous TCR, may be manufactured as described in WO2015120096, by a method comprising: obtaining a population of lymphocytes; stimulating the population of lymphocytes with one or more stimulating agents to produce a population of activated T cells, wherein the stimulation is performed in a closed system using serum-free culture medium; transducing the population of activated T cells with a viral vector comprising a nucleic acid molecule which encodes the CAR or TCR, using at least one cycle transduction to produce a population of transduced T cells, wherein the transduction is performed in a closed system using serum-free culture medium; and expanding the population of transduced T cells to produce a population of engineered T cells, wherein the expansion is performed in a closed system using serum-free culture medium. The predetermined time for expanding the population of transduced T cells may be 3 days. The time from enriching the population of lymphocytes to producing the engineered T cells may be 6 days. The closed system may be a closed bag system. Further provided is population of T cells comprising a CAR or an exogenous TCR obtainable or obtained by said method, and a pharmaceutical composition comprising such cells.

[0758] In certain embodiments, T cell maturation or differentiation in vitro may be delayed or inhibited by the method as described in WO2017070395, comprising contacting one or more T cells from a subject in need of a T cell therapy with an AKT inhibitor (such as, e.g., one or a combination of two or more AKT inhibitors disclosed in claim 8 of WO2017070395) and at least one of exogenous Interleukin-7 (IL-7) and exogenous Interleukin-15 (IL-15), wherein the resulting T cells exhibit delayed maturation or differentiation, and/or wherein the resulting T cells exhibit improved T cell function (such as, e.g., increased T cell proliferation; increased cytokine production; and/or increased cytolytic activity) relative to a T cell function of a T cell cultured in the absence of an AKT inhibitor.

[0759] In certain embodiments, a patient in need of a T cell therapy may be conditioned by a method as described in WO2016191756 comprising administering to the patient a dose of cyclophosphamide between 200 mg/m2/day and 2000 mg/m2/day and a dose of fludarabine between 20 mg/m2/day and 900 mg/m²/day.

### Treating and Preventing Diseases Using RNA Editing

[0760] In some embodiments, the disease, disorder, and/condition or symptom thereof can be treated or prevented using a composition or system described herein. In some embodiments, the composition, system, described herein is a nucleic acid editing system. In some embodiments, treatment or prevention using a composition or system described herein can have the advantage of less immunogenicity than a nucleic acid editing composition, system, and is not as hindered by limitations on viral vector packaging size. Further, as the effect is transient, the effect can be better controlled over time and can potentially be reversible. Thus, they pose less risk of causing permeant detrimental effects than nucleic acid editing-based preventatives and treatments.

[0761] Any disease involving a dysfunctional nucleic acid molecule, where the dysfunction is the result of a mutation in the nucleic acid sequence can be treated or prevented by modifying its sequence using a composition, system, capable of nucleic acid modification described elsewhere herein. In some embodiments, the disease that can be treated or prevented using a composition, system, capable of RNA modification can be one or more of those listed in Tables 3-4, or a combination thereof. In some embodiments, the coding sequence for the gene involved in the disease is greater than the packaging capacity of a viral vector system, particularly an AAV vector system.

[0762] The potential for RNA editing has now been demonstrated in vitro and in vivo for pathogenic mutations in genes related to cystic fibrosis, Duchenne's muscular dystrophy, Hurler's syndrome, and Ornithine transcarbamylase (OTC) deficiency, among others. See e.g. Katrekar et al. Nat. Methods. 2019. 16:239-242; Montieel-Gonzalez et la. 2013. PNAS USA. 110: 18285-18290; Sinnamon et al. PNAS USA 2017; Wettengel et al. Curr. Gene Ther. 2018, 18:31-39; Qu et al. BioRxiv. 2019., 605972; and Fry et al. 2020. Int. J. Mol. Sci. 12:777, which are incorporated by reference as if expressed in their entirety here and the teachings of which can be adapted in view of the description herein to the CRISPR-Cas Systems described herein.

[0763] In some embodiments, the disease is an inherited retinal degeneration disease. In some embodiments, gene whose transcript can be modified using a composition, system, described herein capable of nucleic acid modification that is associated with inherited retinal degeneration and whose coding sequence is too large for packaging in a single AAV can be ABC4, USH2A, CEP290, MYO7A, EYS, and CDH23.

### Models of Diseases and Conditions

[0764] In an aspect, the invention provides a method of modeling a disease associated with a genomic locus in a eukaryotic organism or a non-human organism comprising manipulation of a target sequence within a coding, non-coding or regulatory element of said genomic locus comprising delivering a non-naturally occurring or engineered composition comprising a viral vector system comprising one or more viral vectors operably encoding a composition for expression thereof, wherein the composition comprises particle delivery system or the delivery system or the virus particle of any one of the above embodiments or the cell of any one of the above embodiment.

[0765] In one aspect, the invention provides a method of generating a model eukaryotic cell that can include one or more a mutated disease genes and/or infectious microorganisms. In some embodiments, a disease gene is any gene associated an increase in the risk of having or developing a disease. In some embodiments, the method includes (a) introducing one or more vectors into a eukaryotic cell, wherein the one or more vectors comprise a composition, system, and/or component thereof and/or a vector or vector system that is capable of driving expression of a composition, system, and/or component thereof including, but not limited to: a guide sequence optionally linked to a tracr mate sequence, a tracr sequence, one or more Cas effectors, and combinations thereof and (b) allowing a composition, system, or complex to bind to one or more target polynucleotides, e.g., to effect cleavage, nicking, or other modification of the target polynucleotide within said disease gene, wherein the composition, system, or complex is composed of one or more CRISPR-Cas effectors complexed with (1) one or more guide sequences that is/are hybridized to the target sequence(s) within the target polynucleotide(s), and optionally (2) the tracr mate sequence(s) that is/are hybridized to the tracr sequence(s), thereby generating a model eukaryotic cell comprising one or more mutated disease gene(s). Thus, in some embodiments the composition, system, contains nucleic acid molecules for and drives expression of one or more of: a Cas effector, a guide sequence linked to a tracr mate sequence, and a tracr sequence and/or a Homologous Recombination template and/or a stabilizing ligand if the Cas effector has a destabilization domain. In some embodiments, said cleavage comprises cleaving one or two strands at the location of the target sequence by the Cas effector(s). In some embodiments, nicking comprises nicking one or two strands at the location of the target sequence by the Cas effector(s). In some embodiments, said cleavage or nicking results in modified transcription of a target polynucleotide. In some embodiments, modification results in decreased transcription of the target polynucleotide. In some embodiments, the method further comprises repairing said cleaved or nicked target polynucleotide by homologous recombination with an exogenous template polynucleotide, wherein said repair results in a mutation comprising an insertion, deletion, or substitution of one or more nucleotides of said target polynucleotide. In some embodiments, said mutation results in one or more amino acid changes in a protein expression from a gene comprising the target sequence.

[0766] The disease modeled can be any disease with a genetic or epigenetic component. In some embodiments, the disease modeled can be any as discussed elsewhere herein, including but not limited to any as set forth in Tables 4 and 5 herein.

### In Situ Disease Detection

[0767] The compositions, systems, and/or components thereof can be used for diagnostic methods of detection such as in CASFISH (see e.g. Deng et al. 2015. PNAS USA 112(38): 11870-11875), CRISPR-Live FISH (see e.g. Wang et al. 2020. Science; 365(6459):1301-1305), sm-FISH (Lee and Jefcoate. 2017. Front. Endocrinol. doi.org/10.3389/fendo.2017.00289), sequential FISH CRISPRainbow (Ma et al. Nat Biotechnol, 34 (2016), pp. 528-530), CRISPR-Sirius (Nat Methods, 15 (2018), pp. 928-931), Casilio (Cheng et al. Cell Res, 26 (2016), pp. 254-257), Halo-Tag based genomic loci visualization techniques (e.g. Deng et al. 2015. PNAS USA 112(38): 11870-11875; Knight et al., Science, 350 (2015), pp. 823-826), RNA-aptamer based methods (e.g. Ma et al., J Cell Biol, 214 (2016), pp. 529-537), molecular beacon-based methods (e.g. Zhao et al. Biomaterials, 100 (2016), pp. 172-183; Wu et al. Nucleic Acids Res (2018)), Quantum Dot-based systems (e.g. Ma et al. Anal Chem, 89 (2017), pp. 12896-12901), multiplexed methods (e.g. Ma et al., Proc Natl Acad Sci USA, 112 (2015), pp. 3002-3007; Fu et al. Nat Commun, 7 (2016), p. 11707; Ma et al. Nat Biotechnol, 34 (2016), pp. 528-530; Shao et al. Nucleic Acids Res, 44 (2016), Article e86); Wang et al. Sci Rep, 6 (2016), p. 26857), 9, and other in situ CRISPR-hybridization based methods (e.g. Chen et al. Cell, 155 (2013), pp. 1479-1491; Gu et al. Science, 359 (2018), pp. 1050-1055; Tanebaum et al. Cell, 159 (2014), pp. 635-646; Ye et al. Protein Cell, 8 (2017), pp. 853-855; Chen et al. Nat Commun, 9 (2018), p. 5065; Shao et al. ACS Synth Biol (2017); Fu et al. Nat Commun, 7 (2016), p. 11707; Shao et al. Nucleic Acids Res, 44 (2016), Article e86; Wang et al., Sci Rep, 6 (2016), p. 26857), all of which are incorporated by reference herein as if expressed in their entirety and whose teachings can be adapted to the compositions, systems, and components thereof described herein in view of the description herein.

[0768] In some embodiments, the composition, system, or component thereof can be used in a detection method, such as an in situ detection method described herein. In some embodiments, the composition, system, or component thereof can include a catalytically inactivate Cas effector described herein and use this system in detection methods such as fluorescence in situ hybridization (FISH) or any other described herein. In some embodiments, the inactivated Cas effector, which lacks the ability to produce DNA double-strand breaks may be fused with a marker, such as fluorescent protein, such as the enhanced green fluorescent protein (eEGFP) and co-expressed with small guide RNAs to target pericentric, centric and telomeric repeats in vivo. The dCas effector or system thereof can be used to visualize both repetitive sequences and individual genes in the human genome. Such new applications of labelled dCas effector and compositions, systems, thereof can be important in imaging cells and studying the functional nuclear architecture, especially in cases with a small nucleus volume or complex 3-D structures.

### Cell Selection

[0769] In some embodiments, the compositions, systems, and/or components thereof described herein can be used in a method to screen and/or select cells. In some embodiments, composition, system, -based screening/selection method can be used to identify diseased cells in a cell population. In some embodiments, selection of the cells results in a modification in the cells such that the selected cells die. In this way, diseased cells can be identified, and removed from the healthy cell population. In some embodiments, the diseased cells can be a cancer cell, pre-cancerous cell, a virus or other pathogenic organism infected cells, or otherwise abnormal cell. In some embodiments, the modification can impart another detectable change in the cells to be selected (e.g. a functional change and/or genomic barcode) that facilitates selection of the desired cells. In some embodiments a negative selection scheme can be used to obtain a desired cell population. In these embodiments, the cells to be selected against are modified, thus can be removed from the cell population based on their death or identification or sorting based the detectable change imparted on the cells. Thus, in these embodiments, the remaining cells after selection are the desired cell population.

[0770] In some embodiments, a method of selecting one or more cell(s) containing a polynucleotide modification can include: introducing one or more composition, system,(s) and/or components thereof, and/or vectors or vector systems into the cell(s), wherein the composition, system,(s) and/or components thereof, and/or vectors or vector systems contains and/or is capable of expressing one or more of: a Cas effector, a guide sequence optionally linked to a tracr mate sequence, a tracr sequence, and an editing template; wherein, for example that which is being expressed is within and expressed in vivo by the composition, system, vector or vector system and/or the editing template comprises the one or more mutations that abolish Cas effector cleavage; allowing homologous recombination of the editing template with the target polynucleotide in the cell(s) to be selected; allowing a composition, system, or complex to bind to a target polynucleotide to effect cleavage of the target polynucleotide within said gene, wherein the AAV-CAST complex comprises the Cas effector complexed with (1) the guide sequence that is hybridized to the target sequence within the target polynucleotide, and (2) the tracr mate sequence that is hybridized to the tracr sequence, wherein binding of the complex to the target polynucleotide induces cell death or imparts some other detectable change to the cell, thereby allowing one or more cell(s) in which one or more mutations have been introduced to be selected. In some embodiments, the cell to be selected may be a eukaryotic cell. In some embodiments, the cell to be selected may be a prokaryotic cell. Selection of specific cells via the methods herein can be performed without requiring a selection marker or a two-step process that may include a counter-selection system.

### Therapeutic Agent Development

[0771] The compositions, systems, and components thereof described herein can be used to develop CRISPR-Cas-based and non-CRISPR-Cas-based biologically active agents, such as small molecule therapeutics. Thus, described herein are methods for developing a biologically active agent that modulates a cell function and/or signaling event associated with a disease and/or disease gene. In some embodiments, the method comprises (a) contacting a test compound with a diseased cell and/or a cell containing a disease gene cell; and (b) detecting a change in a readout that is indicative of a reduction or an augmentation of a cell signaling event or other cell functionality associated with said disease or disease gene, thereby developing said biologically active agent that modulates said cell signaling event or other functionality associated with said disease gene. In some embodiments, the diseased cell is a model cell described elsewhere herein. In some embodiments, the diseased cell is a diseased cell isolated from a subject in need of treatment. In some embodiments, the test compound is a small molecule agent. In some embodiments, test compound is a small molecule agent. In some embodiments, the test compound is a biologic molecule agent.

[0772] In some embodiments, the method involves developing a therapeutic based on the composition, system, described herein. In particular embodiments, the therapeutic comprises a Cas effector and/or a guide RNA capable of hybridizing to a target sequence of interest. In particular embodiments, the therapeutic is a vector or vector system that can contain a) a first regulatory element operably linked to a nucleotide sequence encoding the Cas effector protein(s); and b) a second regulatory element operably linked to one or more nucleotide sequences encoding one or more nucleic acid molecules comprising a guide RNA comprising a guide sequence, a direct repeat sequence; wherein components (a) and (b) are located on same or different vectors. In particular embodiments, the biologically active agent is a composition comprising a delivery system operably configured to deliver composition, system, or components thereof, and/or or one or more polynucleotide sequences, vectors, or vector systems containing or encoding said components into a cell and capable of forming a complex with the components of the composition and system herein, and wherein said complex is operable in the cell. In some embodiments, the complex can include the Cas effector protein(s) as described herein, guide RNA comprising the guide sequence, and a direct repeat sequence. In any such compositions, the delivery system can be a yeast system, a lipofection system, a microinjection system, a biolistic system, virosomes, liposomes, immunoliposomes, polycations, lipid:nucleic acid conjugates or artificial virions, or any other system as described herein. In particular embodiments, the delivery is via a particle, a nanoparticle, a lipid or a cell penetrating peptide (CPP).

[0773] Also described herein are methods for developing or designing a composition, system, optionally a composition, system, based therapy or therapeutic, comprising (a) selecting for a (therapeutic) locus of interest gRNA target sites, wherein said target sites have minimal sequence variation across a population, and from said selected target sites subselecting target sites, wherein a gRNA directed against said target sites recognizes a minimal number of off-target sites across said population, or (b) selecting for a (therapeutic) locus of interest gRNA target sites, wherein said target sites have minimal sequence variation across a population, or selecting for a (therapeutic) locus of interest gRNA target sites, wherein a gRNA directed against said target sites recognizes a minimal number of off-target sites across said population, and optionally estimating the number of (sub)selected target sites needed to treat or otherwise modulate or manipulate a population, and optionally validating one or more of the (sub)selected target sites for an individual subject, optionally designing one or more gRNA recognizing one or more of said (sub)selected target sites.

[0774] In some embodiments, the method for developing or designing a gRNA for use in a composition, system, optionally a composition, system, based therapy or therapeutic, can include (a) selecting for a (therapeutic) locus of interest gRNA target sites, wherein said target sites have minimal sequence variation across a population, and from said selected target sites subselecting target sites, wherein a gRNA directed against said target sites recognizes a minimal number of off-target sites across said population, or (b) selecting for a (therapeutic) locus of interest gRNA target sites, wherein said target sites have minimal sequence variation across a population, or selecting for a (therapeutic) locus of interest gRNA target sites, wherein a gRNA directed against said target sites recognizes a minimal number of off-target sites across said population, and optionally estimating the number of (sub)selected target sites needed to treat or otherwise modulate or manipulate a population, optionally validating one or more of the (sub)selected target sites for an individual subject, optionally designing one or more gRNA recognizing one or more of said (sub)selected target sites.

[0775] In some embodiments, thee method for developing or designing a composition, system, optionally a composition, system, based therapy or therapeutic in a population, can include (a) selecting for a (therapeutic) locus of interest gRNA target sites, wherein said target sites have minimal sequence variation across a population, and from said selected target sites subselecting target sites, wherein a gRNA directed against said target sites recognizes a minimal number of off-target sites across said population, or (b) selecting for a (therapeutic) locus of interest gRNA target sites, wherein said target sites have minimal sequence variation across a population, or selecting for a (therapeutic) locus of interest gRNA target sites, wherein a gRNA directed against said target sites recognizes a minimal number of off-target sites across said population, and optionally estimating the number of (sub)selected target sites needed to treat or otherwise modulate or manipulate a population, optionally validating one or more of the (sub)selected target sites for an individual subject, optionally designing one or more gRNA recognizing one or more of said (sub)selected target sites.

[0776] In some embodiments the method for developing or designing a gRNA for use in a composition, system, optionally a composition, system, based therapy or therapeutic in a population, can include (a) selecting for a (therapeutic) locus of interest gRNA target sites, wherein said target sites have minimal sequence variation across a population, and from said selected target sites subselecting target sites, wherein a gRNA directed against said target sites recognizes a minimal number of off-target sites across said population, or (b) selecting for a (therapeutic) locus of interest gRNA target sites, wherein said target sites have minimal sequence variation across a population, or selecting for a (therapeutic) locus of interest gRNA target sites, wherein a gRNA directed against said target sites recognizes a minimal number of off-target sites across said population, and optionally estimating the number of (sub)selected target sites needed to treat or otherwise modulate or manipulate a population, optionally validating one or more of the (sub)selected target sites for an individual subject, optionally designing one or more gRNA recognizing one or more of said (sub)selected target sites.

[0777] In some embodiments, the method for developing or designing a composition, system, such as a composition, system, based therapy or therapeutic, optionally in a population; or for developing or designing a gRNA for use in a composition, system, optionally a composition, system, based therapy or therapeutic, optionally in a population, can include: selecting a set of target sequences for one or more loci in a target population, wherein the target sequences do not contain variants occurring above a threshold allele frequency in the target population (i.e. platinum target sequences); removing from said selected (platinum) target sequences any target sequences having high frequency off-target candidates (relative to other (platinum) targets in the set) to define a final target sequence set; preparing one or more, such as a set of compositions, systems, based on the final target sequence set, optionally wherein a number of CRISP-Cas systems prepared is based (at least in part) on the size of a target population.

[0778] In certain embodiments, off-target candidates/off-targets, PAM restrictiveness, target cleavage efficiency, or effector protein specificity is identified or determined using a sequencing-based double-strand break (DSB) detection assay, such as described herein elsewhere. In certain embodiments, off-target candidates/off-targets are identified or determined using a sequencing-based double-strand break (DSB) detection assay, such as described herein elsewhere. In certain embodiments, off-targets, or off target candidates have at least 1, preferably 1-3, mismatches or (distal) PAM mismatches, such as 1 or more, such as 1, 2, 3, or more (distal) PAM mismatches. In certain embodiments, sequencing-based DSB detection assay comprises labeling a site of a DSB with an adapter comprising a primer binding site, labeling a site of a DSB with a barcode or unique molecular identifier, or combination thereof, as described herein elsewhere.

[0779] It will be understood that the guide sequence of the gRNA is 100% complementary to the target site, i.e. does not comprise any mismatch with the target site. It will be further understood that “recognition” of an (off-)target site by a gRNA presupposes composition, system, functionality, i.e. an (off-)target site is only recognized by a gRNA if binding of the gRNA to the (off-)target site leads to composition, system, activity (such as induction of single or double strand DNA cleavage, transcriptional modulation, etc.).

[0780] In certain embodiments, the target sites having minimal sequence variation across a population are characterized by absence of sequence variation in at least 99%, preferably at least 99.9%, more preferably at least 99.99% of the population. In certain embodiments, optimizing target location comprises selecting target sequences or loci having an absence of sequence variation in at least 99%, %, preferably at least 99.9%, more preferably at least 99.99% of a population. These targets are referred to herein elsewhere also as “platinum targets”. In certain embodiments, said population comprises at least 1000 individuals, such as at least 5000 individuals, such as at least 10000 individuals, such as at least 50000 individuals.

[0781] In certain embodiments, the off-target sites are characterized by at least one mismatch between the off-target site and the gRNA. In certain embodiments, the off-target sites are characterized by at most five, preferably at most four, more preferably at most three mismatches between the off-target site and the gRNA. In certain embodiments, the off-target sites are characterized by at least one mismatch between the off-target site and the gRNA and by at most five, preferably at most four, more preferably at most three mismatches between the off-target site and the gRNA.

[0782] In certain embodiments, said minimal number of off-target sites across said population is determined for high-frequency haplotypes in said population. In certain embodiments, said minimal number of off-target sites across said population is determined for high-frequency haplotypes of the off-target site locus in said population. In certain embodiments, said minimal number of off-target sites across said population is determined for high-frequency haplotypes of the target site locus in said population. In certain embodiments, the high-frequency haplotypes are characterized by occurrence in at least 0.1% of the population.

[0783] In certain embodiments, the number of (sub)selected target sites needed to treat a population is estimated based on based low frequency sequence variation, such as low frequency sequence variation captured in large scale sequencing datasets. In certain embodiments, the number of (sub)selected target sites needed to treat a population of a given size is estimated.

[0784] In certain embodiments, the method further comprises obtaining genome sequencing data of a subject to be treated; and treating the subject with a composition, system, selected from the set of compositions, systems, wherein the composition, system, selected is based (at least in part) on the genome sequencing data of the individual. In certain embodiments, the ((sub)selected) target is validated by genome sequencing, preferably whole genome sequencing.

[0785] In certain embodiments, target sequences or loci as described herein are (further) selected based on optimization of one or more parameters, such as PAM type (natural or modified), PAM nucleotide content, PAM length, target sequence length, PAM restrictiveness, target cleavage efficiency, and target sequence position within a gene, a locus or other genomic region. Methods of optimization are discussed in greater detail elsewhere herein.

[0786] In certain embodiments, target sequences or loci as described herein are (further) selected based on optimization of one or more of target loci location, target length, target specificity, and PAM characteristics. As used herein, PAM characteristics may comprise for instance PAM sequence, PAM length, and/or PAM GC contents. In certain embodiments, optimizing PAM characteristics comprises optimizing nucleotide content of a PAM. In certain embodiments, optimizing nucleotide content of PAM is selecting a PAM with a motif that maximizes abundance in the one or more target loci, minimizes mutation frequency, or both. Minimizing mutation frequency can for instance be achieved by selecting PAM sequences devoid of or having low or minimal CpG.

[0787] In certain embodiments, the effector protein for each composition, system, in the set of compositions, systems, is selected based on optimization of one or more parameters selected from the group consisting of; effector protein size, ability of effector protein to access regions of high chromatin accessibility, degree of uniform enzyme activity across genomic targets, epigenetic tolerance, mismatch/budge tolerance, effector protein specificity, effector protein stability or half-life, effector protein immunogenicity or toxicity. Methods of optimization are discussed in greater detail elsewhere herein.

### Optimization of the Systems

[0788] The methods of the present invention can involve optimization of selected parameters or variables associated with the composition, system, and/or its functionality, as described herein further elsewhere. Optimization of the composition, system, in the methods as described herein may depend on the target(s), such as the therapeutic target or therapeutic targets, the mode or type of composition, system, modulation, such as composition, system, based therapeutic target(s) modulation, modification, or manipulation, as well as the delivery of the composition, system, components. One or more targets may be selected, depending on the genotypic and/or phenotypic outcome. For instance, one or more therapeutic targets may be selected, depending on (genetic) disease etiology or the desired therapeutic outcome. The (therapeutic) target(s) may be a single gene, locus, or other genomic site, or may be multiple genes, loci or other genomic sites. As is known in the art, a single gene, locus, or other genomic site may be targeted more than once, such as by use of multiple gRNAs.

[0789] The activity of the composition and/or system, such as CRISPR-Cas or CAST system-based therapy or therapeutics may involve target disruption, such as target mutation, such as leading to gene knockout. The activity of the composition and/or system, such as CRISPR-Cas or CAST system-based therapy or therapeutics may involve replacement of particular target sites, such as leading to target correction. CRISPR-Cas or CAST system-based therapy or therapeutics may involve removal of particular target sites, such as leading to target deletion. The activity of the composition and/or system, such as CRISPR-Cas or CAST system-based therapy or therapeutics may involve modulation of target site functionality, such as target site activity or accessibility, leading for instance to (transcriptional and/or epigenetic) gene or genomic region activation or gene or genomic region silencing. The skilled person will understand that modulation of target site functionality may involve CRISPR effector mutation (such as for instance generation of a catalytically inactive CRISPR effector) and/or functionalization (such as for instance fusion of the CRISPR effector with a heterologous functional domain, such as a transcriptional activator or repressor), as described herein elsewhere.

[0790] Accordingly, in an aspect, the invention relates to a method as described herein, comprising selection of one or more (therapeutic) target, selecting one or more functionality of the composition and/or system, and optimization of selected parameters or variables associated with the CRISPR-Cas or CAST system and/or its functionality. In a related aspect, the invention relates to a method as described herein, comprising (a) selecting one or more (therapeutic) target loci, (b) selecting one or more CRISPR-Cas system functionalities, (c) optionally selecting one or more modes of delivery, and preparing, developing, or designing a CRISPR-Cas system or CAST selected based on steps (a)-(c).

[0791] In certain embodiments, the functionality of the composition and/or system comprises genomic mutation. In certain embodiments, the functionality of the composition and/or system comprises single genomic mutation. In certain embodiments, the functionality of the composition and/or system functionality comprises multiple genomic mutation. In certain embodiments, the functionality of the composition and/or system comprises gene knockout. In certain embodiments, the functionality of the composition and/or system comprises single gene knockout. In certain embodiments, the functionality of the composition and/or system comprises multiple gene knockout. In certain embodiments, the functionality of the composition and/or system comprises gene correction. In certain embodiments, the functionality of the composition and/or system comprises single gene correction. In certain embodiments, the functionality of the composition and/or system comprises multiple gene correction. In certain embodiments, the functionality of the composition and/or system comprises genomic region correction. In certain embodiments, the functionality of the composition and/or system comprises single genomic region correction. In certain embodiments, the functionality of the composition and/or system comprises multiple genomic region correction. In certain embodiments, the functionality of the composition and/or system comprises gene deletion. In certain embodiments, the functionality of the composition and/or system comprises single gene deletion. In certain embodiments, the functionality of the composition and/or system comprises multiple gene deletion. In certain embodiments, the functionality of the composition and/or system comprises genomic region deletion. In certain embodiments, the functionality of the composition and/or system comprises single genomic region deletion. In certain embodiments, the functionality of the composition and/or system comprises multiple genomic region deletion. In certain embodiments, the functionality of the composition and/or system comprises modulation of gene or genomic region functionality. In certain embodiments, the functionality of the composition and/or system comprises modulation of single gene or genomic region functionality. In certain embodiments, the functionality of the composition and/or system comprises modulation of multiple gene or genomic region functionality. In certain embodiments, the functionality of the composition and/or system comprises gene or genomic region functionality, such as gene or genomic region activity. In certain embodiments, the functionality of the composition and/or system comprises single gene or genomic region functionality, such as gene or genomic region activity. In certain embodiments, the functionality of the composition and/or system comprises multiple gene or genomic region functionality, such as gene or genomic region activity. In certain embodiments, the functionality of the composition and/or system comprises modulation gene activity or accessibility optionally leading to transcriptional and/or epigenetic gene or genomic region activation or gene or genomic region silencing. In certain embodiments, the functionality of the composition and/or system comprises modulation single gene activity or accessibility optionally leading to transcriptional and/or epigenetic gene or genomic region activation or gene or genomic region silencing. In certain embodiments, the functionality of the composition and/or system comprises modulation multiple gene activity or accessibility optionally leading to transcriptional and/or epigenetic gene or genomic region activation or gene or genomic region silencing.

[0792] Optimization of selected parameters or variables in the methods as described herein may result in optimized or improved the system, such as CISPR-Cas or CAST system-based therapy or therapeutic, specificity, efficacy, and/or safety. In certain embodiments, one or more of the following parameters or variables are taken into account, are selected, or are optimized in the methods of the invention as described herein: Cas protein allosteric interactions, Cas protein functional domains and functional domain interactions, CRISPR effector specificity, gRNA specificity, CRISPR-Cas complex specificity, PAM restrictiveness, PAM type (natural or modified), PAM nucleotide content, PAM length, CRISPR effector activity, gRNA activity, CRISPR-Cas complex activity, target cleavage efficiency, target site selection, target sequence length, ability of effector protein to access regions of high chromatin accessibility, degree of uniform enzyme activity across genomic targets, epigenetic tolerance, mismatch/budge tolerance, CRISPR effector stability, CRISPR effector mRNA stability, gRNA stability, CRISPR-Cas or CAST complex stability, CRISPR effector protein or mRNA immunogenicity or toxicity, gRNA immunogenicity or toxicity, CRISPR-Cas complex immunogenicity or toxicity, CRISPR effector protein or mRNA dose or titer, gRNA dose or titer, CRISPR-Cas or CAST complex dose or titer, CRISPR effector protein size, CRISPR effector expression level, gRNA expression level, CRISPR-Cas or CAST complex expression level, CRISPR effector spatiotemporal expression, gRNA spatiotemporal expression, CRISPR-Cas or CAST complex spatiotemporal expression.

[0793] By means of example, and without limitation, parameter or variable optimization may be achieved as follows. CRISPR effector specificity may be optimized by selecting the most specific CRISPR effector. This may be achieved for instance by selecting the most specific CRISPR effector orthologue or by specific CRISPR effector mutations which increase specificity. gRNA specificity may be optimized by selecting the most specific gRNA. This can be achieved for instance by selecting gRNA having low homology, i.e. at least one or preferably more, such as at least 2, or preferably at least 3, mismatches to off-target sites. CRISPR-Cas complex specificity may be optimized by increasing CRISPR effector specificity and/or gRNA specificity as above. PAM restrictiveness may be optimized by selecting a CRISPR effector having to most restrictive PAM recognition. This can be achieved for instance by selecting a CRISPR effector orthologue having more restrictive PAM recognition or by specific CRISPR effector mutations which increase or alter PAM restrictiveness. PAM type may be optimized for instance by selecting the appropriate CRISPR effector, such as the appropriate CRISPR effector recognizing a desired PAM type. The CRISPR effector or PAM type may be naturally occurring or may for instance be optimized based on CRISPR effector mutants having an altered PAM recognition, or PAM recognition repertoire. PAM nucleotide content may for instance be optimized by selecting the appropriate CRISPR effector, such as the appropriate CRISPR effector recognizing a desired PAM nucleotide content. The CRISPR effector or PAM type may be naturally occurring or may for instance be optimized based on CRISPR effector mutants having an altered PAM recognition, or PAM recognition repertoire. PAM length may for instance be optimized by selecting the appropriate CRISPR effector, such as the appropriate CRISPR effector recognizing a desired PAM nucleotide length. The CRISPR effector or PAM type may be naturally occurring or may for instance be optimized based on CRISPR effector mutants having an altered PAM recognition, or PAM recognition repertoire.

[0794] Target length or target sequence length may for instance be optimized by selecting the appropriate CRISPR effector, such as the appropriate CRISPR effector recognizing a desired target or target sequence nucleotide length. Alternatively, or in addition, the target (sequence) length may be optimized by providing a target having a length deviating from the target (sequence) length typically associated with the CRISPR effector, such as the naturally occurring CRISPR effector. The CRISPR effector or target (sequence) length may be naturally occurring or may for instance be optimized based on CRISPR effector mutants having an altered target (sequence) length recognition, or target (sequence) length recognition repertoire. For instance, increasing or decreasing target (sequence) length may influence target recognition and/or off-target recognition. CRISPR effector activity may be optimized by selecting the most active CRISPR effector. This may be achieved for instance by selecting the most active CRISPR effector orthologue or by specific CRISPR effector mutations which increase activity. The ability of the CRISPR effector protein to access regions of high chromatin accessibility, may be optimized by selecting the appropriate CRISPR effector or mutant thereof, and can consider the size of the CRISPR effector, charge, or other dimensional variables etc. The degree of uniform CRISPR effector activity may be optimized by selecting the appropriate CRISPR effector or mutant thereof, and can consider CRISPR effector specificity and/or activity, PAM specificity, target length, mismatch tolerance, epigenetic tolerance, CRISPR effector and/or gRNA stability and/or half-life, CRISPR effector and/or gRNA immunogenicity and/or toxicity, etc. gRNA activity may be optimized by selecting the most active gRNA. In some embodiments, this can be achieved by increasing gRNA stability through RNA modification. CRISPR-Cas complex activity may be optimized by increasing CRISPR effector activity and/or gRNA activity as above.

[0795] The target site selection may be optimized by selecting the optimal position of the target site within a gene, locus or other genomic region. The target site selection may be optimized by optimizing target location comprises selecting a target sequence with a gene, locus, or other genomic region having low variability. This may be achieved for instance by selecting a target site in an early and/or conserved exon or domain (i.e. having low variability, such as polymorphisms, within a population).

[0796] In certain embodiments, optimizing target (sequence) length comprises selecting a target sequence within one or more target loci between 5 and 25 nucleotides. In certain embodiments, a target sequence is 20 nucleotides.

[0797] In certain embodiments, optimizing target specificity comprises selecting targets loci that minimize off-target candidates.

[0798] In some embodiments, the target site may be selected by minimization of off-target effects (e.g. off-targets qualified as having 1-5, 1-4, or preferably 1-3 mismatches compared to target and/or having one or more PAM mismatches, such as distal PAM mismatches), preferably also considering variability within a population. CRISPR effector stability may be optimized by selecting CRISPR effector having appropriate half-life, such as preferably a short half-life while still capable of maintaining sufficient activity. In some embodiments, this can be achieved by selecting an appropriate CRISPR effector orthologue having a specific half-life or by specific CRISPR effector mutations or modifications which affect half-life or stability, such as inclusion (e.g. fusion) of stabilizing or destabilizing domains or sequences. CRISPR effector mRNA stability may be optimized by increasing or decreasing CRISPR effector mRNA stability. In some embodiments, this can be achieved by increasing or decreasing CRISPR effector mRNA stability through mRNA modification. gRNA stability may be optimized by increasing or decreasing gRNA stability. In some embodiments, this can be achieved by increasing or decreasing gRNA stability through RNA modification. CRISPR-Cas or CAST complex stability may be optimized by increasing or decreasing CRISPR effector stability and/or gRNA stability as above. CRISPR effector protein or mRNA immunogenicity or toxicity may be optimized by decreasing CRISPR effector protein or mRNA immunogenicity or toxicity. In some embodiments, this can be achieved by mRNA or protein modifications. Similarly, in case of DNA based expression systems, DNA immunogenicity or toxicity may be decreased. gRNA immunogenicity or toxicity may be optimized by decreasing gRNA immunogenicity or toxicity. In some embodiments, this can be achieved by gRNA modifications. Similarly, in case of DNA based expression systems, DNA immunogenicity or toxicity may be decreased. CRISPR-Cas or CAST complex immunogenicity or toxicity may be optimized by decreasing CRISPR effector immunogenicity or toxicity and/or gRNA immunogenicity or toxicity as above, or by selecting the least immunogenic or toxic CRISPR effector/gRNA combination. Similarly, in case of DNA based expression systems, DNA immunogenicity or toxicity may be decreased. CRISPR effector protein or mRNA dose or titer may be optimized by selecting dosage or titer to minimize toxicity and/or maximize specificity and/or efficacy. gRNA dose or titer may be optimized by selecting dosage or titer to minimize toxicity and/or maximize specificity and/or efficacy. CRISPR-Cas or CAST complex dose or titer may be optimized by selecting dosage or titer to minimize toxicity and/or maximize specificity and/or efficacy. CRISPR effector protein size may be optimized by selecting minimal protein size to increase efficiency of delivery, in particular for virus mediated delivery. CRISPR effector, gRNA, or CRISPR-Cas or CAST complex expression level may be optimized by limiting (or extending) the duration of expression and/or limiting (or increasing) expression level. This may be achieved for instance by using self-inactivating compositions, systems, such as including a self-targeting (e.g. CRISPR effector targeting) gRNA, by using viral vectors having limited expression duration, by using appropriate promoters for low (or high) expression levels, by combining different delivery methods for individual CRISP-Cas or CAST system components, such as virus mediated delivery of CRISPR-effector encoding nucleic acid combined with non-virus mediated delivery of gRNA, or virus mediated delivery of gRNA combined with non-virus mediated delivery of CRISPR effector protein or mRNA. CRISPR effector, gRNA, or CRISPR-Cas or CAST complex spatiotemporal expression may be optimized by appropriate choice of conditional and/or inducible expression systems, including controllable CRISPR effector activity optionally a destabilized CRISPR effector and/or a split CRISPR effector, and/or cell- or tissue-specific expression systems.

[0799] In an aspect, the invention relates to a method as described herein, comprising selection of one or more (therapeutic) target, selecting the functionality of the composition and/or system, selecting CRISPR-Cas system mode of delivery, selecting CRISPR-Cas or CAST system delivery vehicle or expression system, and optimization of selected parameters or variables associated with the CRISPR-Cas system and/or its functionality, optionally wherein the parameters or variables are one or more selected from CRISPR effector specificity, gRNA specificity, CRISPR-Cas or CAST complex specificity, PAM restrictiveness, PAM type (natural or modified), PAM nucleotide content, PAM length, CRISPR effector activity, gRNA activity, CRISPR-Cas c or CAST complex activity, target cleavage efficiency, target site selection, target sequence length, ability of effector protein to access regions of high chromatin accessibility, degree of uniform enzyme activity across genomic targets, epigenetic tolerance, mismatch/budge tolerance, CRISPR effector stability, CRISPR effector mRNA stability, gRNA stability, CRISPR-Cas or CAST complex stability, CRISPR effector protein or mRNA immunogenicity or toxicity, gRNA immunogenicity or toxicity, CRISPR-Cas complex immunogenicity or toxicity, CRISPR effector protein or mRNA dose or titer, gRNA dose or titer, CRISPR-Cas or CAST complex dose or titer, CRISPR effector protein size, CRISPR effector expression level, gRNA or CAST expression level, CRISPR-Cas complex expression level, CRISPR effector spatiotemporal expression, gRNA spatiotemporal expression, CRISPR-Cas or CAST complex spatiotemporal expression.

[0800] In an aspect, the invention relates to a method as described herein, comprising selecting one or more (therapeutic) target, selecting one or more the functionality of the composition and/or system, selecting one or more CRISPR-Cas or CAST system mode of delivery, selecting one or more delivery vehicle or expression system, and optimization of selected parameters or variables associated with the CRISPR-Cas or CAST system and/or its functionality, wherein specificity, efficacy, and/or safety are optimized, and optionally wherein optimization of specificity comprises optimizing one or more parameters or variables selected from CRISPR effector specificity, gRNA specificity, CRISPR-Cas or CAST complex specificity, PAM restrictiveness, PAM type (natural or modified), PAM nucleotide content, PAM length, wherein optimization of efficacy comprises optimizing one or more parameters or variables selected from CRISPR effector activity, gRNA activity, CRISPR-Cas or CAST complex activity, target cleavage efficiency, target site selection, target sequence length, CRISPR effector protein size, ability of effector protein to access regions of high chromatin accessibility, degree of uniform enzyme activity across genomic targets, epigenetic tolerance, mismatch/budge tolerance, and wherein optimization of safety comprises optimizing one or more parameters or variables selected from CRISPR effector stability, CRISPR effector mRNA stability, gRNA stability, CRISPR-Cas or CAST complex stability, CRISPR effector protein or mRNA immunogenicity or toxicity, gRNA immunogenicity or toxicity, CRISPR-Cas or CAST complex immunogenicity or toxicity, CRISPR effector protein or mRNA dose or titer, gRNA dose or titer, CRISPR-Cas or CAST complex dose or titer, CRISPR effector expression level, gRNA expression level, CRISPR-Cas or CAST complex expression level, CRISPR effector spatiotemporal expression, gRNA spatiotemporal expression, CRISPR-Cas or CAST complex spatiotemporal expression.

[0801] In an aspect, the invention relates to a method as described herein, comprising optionally selecting one or more (therapeutic) target, optionally selecting one or more the functionality of the composition and/or system, optionally selecting one or more mode of delivery, optionally selecting one or more delivery vehicle or expression system, and optimization of selected parameters or variables associated with the system and/or its functionality, wherein specificity, efficacy, and/or safety are optimized, and optionally wherein optimization of specificity comprises optimizing one or more parameters or variables selected from CRISPR effector specificity, gRNA specificity, CRISPR-Cas or CAST complex specificity, PAM restrictiveness, PAM type (natural or modified), PAM nucleotide content, PAM length, wherein optimization of efficacy comprises optimizing one or more parameters or variables selected from CRISPR effector activity, gRNA activity, CRISPR-Cas or CAST complex activity, target cleavage efficiency, target site selection, target sequence length, CRISPR effector protein size, ability of effector protein to access regions of high chromatin accessibility, degree of uniform enzyme activity across genomic targets, epigenetic tolerance, mismatch/budge tolerance, and wherein optimization of safety comprises optimizing one or more parameters or variables selected from CRISPR effector stability, CRISPR effector mRNA stability, gRNA stability, CRISPR-Cas complex stability, CRISPR effector protein or mRNA immunogenicity or toxicity, gRNA immunogenicity or toxicity, CRISPR-Cas complex immunogenicity or toxicity, CRISPR effector protein or mRNA dose or titer, gRNA dose or titer, CRISPR-Cas or CAST complex dose or titer, CRISPR effector expression level, gRNA expression level, CRISPR-Cas or CAST complex expression level, CRISPR effector spatiotemporal expression, gRNA spatiotemporal expression, CRISPR-Cas complex spatiotemporal expression.

[0802] In an aspect, the invention relates to a method as described herein, comprising optimization of selected parameters or variables associated with the system and/or its functionality, wherein specificity, efficacy, and/or safety are optimized, and optionally wherein optimization of specificity comprises optimizing one or more parameters or variables selected from CRISPR effector specificity, gRNA specificity, CRISPR-Cas or CAST complex specificity, PAM restrictiveness, PAM type (natural or modified), PAM nucleotide content, PAM length, wherein optimization of efficacy comprises optimizing one or more parameters or variables selected from CRISPR effector activity, gRNA activity, CRISPR-Cas or CAST complex activity, target cleavage efficiency, target site selection, target sequence length, CRISPR effector protein size, ability of effector protein to access regions of high chromatin accessibility, degree of uniform enzyme activity across genomic targets, epigenetic tolerance, mismatch/budge tolerance, and wherein optimization of safety comprises optimizing one or more parameters or variables selected from CRISPR effector stability, CRISPR effector mRNA stability, gRNA stability, CRISPR-Cas complex stability, CRISPR effector protein or mRNA immunogenicity or toxicity, gRNA immunogenicity or toxicity, CRISPR-Cas or CAST complex immunogenicity or toxicity, CRISPR effector protein or mRNA dose or titer, gRNA dose or titer, CRISPR-Cas or CAST complex dose or titer, CRISPR effector expression level, gRNA expression level, CRISPR-Cas or CAST complex expression level, CRISPR effector spatiotemporal expression, gRNA spatiotemporal expression, CRISPR-Cas or CAST complex spatiotemporal expression.

[0803] It will be understood that the parameters or variables to be optimized as well as the nature of optimization may depend on the (therapeutic) target, the functionality of the composition and/or system, the system mode of delivery, and/or the CRISPR-Cas system delivery vehicle or expression system.

[0804] In an aspect, the invention relates to a method as described herein, comprising optimization of gRNA specificity at the population level. Preferably, said optimization of gRNA specificity comprises minimizing gRNA target site sequence variation across a population and/or minimizing gRNA off-target incidence across a population.

[0805] In some embodiments, optimization can result in selection of a CRISPR-Cas effector that is naturally occurring or is modified. In some embodiments, optimization can result in selection of a CRISPR-Cas effector that has nuclease, nickase, deaminase, transposase, and/or has one or more effector functionalities deactivated or eliminated. In some embodiments, optimizing a PAM specificity can include selecting a CRISPR-Cas effector with a modified PAM specificity. In some embodiments, optimizing can include selecting a CRISPR-Cas effector having a minimal size. In certain embodiments, optimizing effector protein stability comprises selecting an effector protein having a short half-life while maintaining sufficient activity, such as by selecting an appropriate CRISPR effector orthologue having a specific half-life or stability. In certain embodiments, optimizing immunogenicity or toxicity comprises minimizing effector protein immunogenicity or toxicity by protein modifications. In certain embodiments, optimizing functional specific comprises selecting a protein effector with reduced tolerance of mismatches and/or bulges between the guide RNA and one or more target loci.

[0806] In certain embodiments, optimizing efficacy comprises optimizing overall efficiency, epigenetic tolerance, or both. In certain embodiments, maximizing overall efficiency comprises selecting an effector protein with uniform enzyme activity across target loci with varying chromatin complexity, selecting an effector protein with enzyme activity limited to areas of open chromatin accessibility. In certain embodiments, chromatin accessibility is measured using one or more of ATAC-seq, or a DNA-proximity ligation assay. In certain embodiments, optimizing epigenetic tolerance comprises optimizing methylation tolerance, epigenetic mark competition, or both. In certain embodiments, optimizing methylation tolerance comprises selecting an effector protein that modify methylated DNA. In certain embodiments, optimizing epigenetic tolerance comprises selecting an effector protein unable to modify silenced regions of a chromosome, selecting an effector protein able to modify silenced regions of a chromosome, or selecting target loci not enriched for epigenetic markers

[0807] In certain embodiments, selecting an optimized guide RNA comprises optimizing gRNA stability, gRNA immunogenicity, or both, or other gRNA associated parameters or variables as described herein elsewhere.

[0808] In certain embodiments, optimizing gRNA stability and/or gRNA immunogenicity comprises RNA modification, or other gRNA associated parameters or variables as described herein elsewhere. In certain embodiments, the modification comprises removing 1-3 nucleotides form the 3′ end of a target complementarity region of the gRNA. In certain embodiments, modification comprises an extended gRNA and/or trans RNA/DNA element that create stable structures in the gRNA that compete with gRNA base pairing at a target of off-target loci, or extended complimentary nucleotides between the gRNA and target sequence, or both.

[0809] In certain embodiments, the mode of delivery comprises delivering gRNA and/or CRISPR effector protein, delivering gRNA and/or CRISPR effector mRNA, or delivery gRNA and/or CRISPR effector as a DNA based expression system. In certain embodiments, the mode of delivery further comprises selecting a delivery vehicle and/or expression systems from the group consisting of liposomes, lipid particles, nanoparticles, biolistics, or viral-based expression/delivery systems. In certain embodiments, expression is spatiotemporal expression is optimized by choice of conditional and/or inducible expression systems, including controllable CRISPR effector activity optionally a destabilized CRISPR effector and/or a split CRISPR effector, and/or cell- or tissue-specific expression system.

[0810] The methods as described herein may further involve selection of the mode of delivery. In certain embodiments, gRNA (and tracr, if and where needed, optionally provided as a sgRNA) and/or CRISPR effector protein are or are to be delivered. In certain embodiments, gRNA (and tracr, if and where needed, optionally provided as a sgRNA) and/or CRISPR effector mRNA are or are to be delivered. In certain embodiments, gRNA (and tracr, if and where needed, optionally provided as a sgRNA) and/or CRISPR effector provided in a DNA-based expression system are or are to be delivered. In certain embodiments, delivery of the individual system components comprises a combination of the above modes of delivery. In certain embodiments, delivery comprises delivering gRNA and/or CRISPR effector protein, delivering gRNA and/or CRISPR effector mRNA, or delivering gRNA and/or CRISPR effector as a DNA based expression system.

[0811] The methods as described herein may further involve selection of the CRISPR-Cas system delivery vehicle and/or expression system. Delivery vehicles and expression systems are described herein elsewhere. By means of example, delivery vehicles of nucleic acids and/or proteins include nanoparticles, liposomes, etc. Delivery vehicles for DNA, such as DNA-based expression systems include for instance biolistics, viral based vector systems (e.g. adenoviral, AAV, lentiviral), etc. the skilled person will understand that selection of the mode of delivery, as well as delivery vehicle or expression system may depend on for instance the cell or tissues to be targeted. In certain embodiments, the delivery vehicle and/or expression system for delivering the compositions, systems, or components thereof comprises liposomes, lipid particles, nanoparticles, biolistics, or viral-based expression/delivery systems.

### Considerations for Therapeutic Applications

[0812] A consideration in genome editing therapy is the choice of sequence-specific nuclease, such as a variant of a Cas (e.g. Cas9 and/or Cas12) nuclease. Each nuclease variant may possess its own unique set of strengths and weaknesses, many of which must be balanced in the context of treatment to maximize therapeutic benefit. For a specific editing therapy to be efficacious, a sufficiently high level of modification must be achieved in target cell populations to reverse disease symptoms. This therapeutic modification ‘threshold’ is determined by the fitness of edited cells following treatment and the amount of gene product necessary to reverse symptoms. With regard to fitness, editing creates three potential outcomes for treated cells relative to their unedited counterparts: increased, neutral, or decreased fitness. In the case of increased fitness, corrected cells may be able and expand relative to their diseased counterparts to mediate therapy. In this case, where edited cells possess a selective advantage, even low numbers of edited cells can be amplified through expansion, providing a therapeutic benefit to the patient. Where the edited cells possess no change in fitness, an increase the therapeutic modification threshold can be warranted. As such, significantly greater levels of editing may be needed to treat diseases, where editing creates a neutral fitness advantage, relative to diseases where editing creates increased fitness for target cells. If editing imposes a fitness disadvantage, as would be the case for restoring function to a tumor suppressor gene in cancer cells, modified cells would be outcompeted by their diseased counterparts, causing the benefit of treatment to be low relative to editing rates. This may be overcome with supplemental therapies to increase the potency and/or fitness of the edited cells relative to the diseased counterparts.

[0813] In addition to cell fitness, the amount of gene product necessary to treat disease can also influence the minimal level of therapeutic genome editing that can treat or prevent a disease or a symptom thereof. In cases where a small change in the gene product levels can result in significant changes in clinical outcome, the minimal level of therapeutic genome editing is less relative to cases where a larger change in the gene product levels are needed to gain a clinically relevant response. In some embodiments, the minimal level of therapeutic genome editing can range from 0.1 to 1%, 1-5%, 5-10%, 10-15%, 15-20%, 20-25%, 25-30%, 30-35%, 35-40%, 40-45%. 45-50%, or 50-55%. Thus, where a small change in gene product levels can influence clinical outcomes and diseases where there is a fitness advantage for edited cells, are ideal targets for genome editing therapy, as the therapeutic modification threshold is low enough to permit a high chance of success.

[0814] The activity of NHEJ and HDR DSB repair can vary by cell type and cell state. NHEJ is not highly regulated by the cell cycle and is efficient across cell types, allowing for high levels of gene disruption in accessible target cell populations. In contrast, HDR acts primarily during S/G2 phase, and is therefore restricted to cells that are actively dividing, limiting treatments that require precise genome modifications to mitotic cells [Ciccia, A. & Elledge, S. J. Molecular cell 40, 179-204 (2010); Chapman, J. R., et al. Molecular cell 47, 497-510 (2012)].

[0815] The efficiency of correction via HDR may be controlled by the epigenetic state or sequence of the targeted locus, or the specific repair template configuration (single vs. double stranded, long vs. short homology arms) used [Hacein-Bey-Abina, S., et al. The New England journal of medicine 346, 1185-1193 (2002); Gaspar, H. B., et al. Lancet 364, 2181-2187 (2004); Beumer, K. J., et al. G3 (2013)]. The relative activity of NHEJ and HDR machineries in target cells may also affect gene correction efficiency, as these pathways may compete to resolve DSBs [Beumer, K. J., et al. Proceedings of the National Academy of Sciences of the United States of America 105, 19821-19826 (2008)]. HDR also imposes a delivery challenge not seen with NHEJ strategies, as it uses the concurrent delivery of nucleases and repair templates. Thus, these differences can be kept in mind when designing, optimizing, and/or selecting a CRISPR-Cas based therapeutic as described in greater detail elsewhere herein.

[0816] CRISPR-Cas- or CAST-based polynucleotide modification application can include combinations of proteins, small RNA molecules, and/or repair templates, and can make, in some embodiments, delivery of these multiple parts substantially more challenging than, for example, traditional small molecule therapeutics. Two main strategies for delivery of compositions, systems, and components thereof have been developed: ex vivo and in vivo. In some embodiments of ex vivo treatments, diseased cells are removed from a subject, edited and then transplanted back into the patient. In other embodiments, cells from a healthy allogeneic donor are collected, modified using a CRISPR-Cas system or component thereof, to impart various functionalities and/or reduce immunogenicity, and administered to an allogeneic recipient in need of treatment. Ex vivo editing has the advantage of allowing the target cell population to be well defined and the specific dosage of therapeutic molecules delivered to cells to be specified. The latter consideration may be particularly important when off-target modifications are a concern, as titrating the amount of nuclease may decrease such mutations (Hsu et al., 2013). Another advantage of ex vivo approaches is the typically high editing rates that can be achieved, due to the development of efficient delivery systems for proteins and nucleic acids into cells in culture for research and gene therapy applications.

[0817] In vivo polynucleotide modification via compositions, systems, and/or components thereof involves direct delivery of the compositions, systems, and/or components thereof to cell types in their native tissues. In vivo polynucleotide modification via compositions, systems, and/or components thereof allows diseases in which the affected cell population is not amenable to ex vivo manipulation to be treated. Furthermore, delivering compositions, systems, and/or components thereof to cells in situ allows for the treatment of multiple tissue and cell types.

[0818] In some embodiments, such as those where viral vector systems are used to generate viral particles to deliver the CRISPR-Cas system and/or component thereof to a cell, the total cargo size of the CRISPR-Cas system and/or component thereof should be considered as vector systems can have limits on the size of a polynucleotide that can be expressed therefrom and/or packaged into cargo inside of a viral particle. In some embodiments, the tropism of a vector system, such as a viral vector system, should be considered as it can impact the cell type to which the CRISPR-Cas system or component thereof can be efficiently and/or effectively delivered.

[0819] When delivering a system or component thereof via a viral-based system, it can be important to consider the amount of viral particles that will be needed to achieve a therapeutic effect so as to account for the potential immune response that can be elicited by the viral particles when delivered to a subject or cell(s). When delivering a system or component thereof via a viral based system, it can be important to consider mechanisms of controlling the distribution and/or dosage of the system in vivo. Generally, to reduce the potential for off-target effects, it is optimal but not necessarily required, that the amount of the system be as close to the minimum or least effective dose. In practice this can be challenging to do.

[0820] In some embodiments, it can be important to considered the immunogenicity of the system or component thereof. In embodiments, where the immunogenicity of the system or component thereof is of concern, the immunogenicity system or component thereof can be reduced. By way of example only, the immunogenicity of the system or component thereof can be reduced using the approach set out in Tangri et al. Accordingly, directed evolution or rational design may be used to reduce the immunogenicity of the CRISPR enzyme in the host species (human or other species).

### Kits

[0821] In another aspect, the present disclosure provides kit and kit of parts. The terms “kit of parts” and “kit” as used throughout this specification refer to a product containing components necessary for carrying out the specified methods (e.g., methods for detecting, quantifying or isolating immune cells as taught herein), packed so as to allow their transport and storage. Materials suitable for packing the components comprised in a kit include crystal, plastic (e.g., polyethylene, polypropylene, polycarbonate), bottles, flasks, vials, ampules, paper, envelopes, or other types of containers, carriers or supports. Where a kit comprises a plurality of components, at least a subset of the components (e.g., two or more of the plurality of components) or all of the components may be physically separated, e.g., comprised in or on separate containers, carriers or supports. The components comprised in a kit may be sufficient or may not be sufficient for carrying out the specified methods, such that external reagents or substances may not be necessary or may be necessary for performing the methods, respectively. Typically, kits are employed in conjunction with standard laboratory equipment, such as liquid handling equipment, environment (e.g., temperature) controlling equipment, analytical instruments, etc. In addition to the recited binding agents(s) as taught herein, such as for example, antibodies, hybridization probes, amplification and/or sequencing primers, optionally provided on arrays or microarrays, the present kits may also include some or all of solvents, buffers (such as for example but without limitation histidine-buffers, citrate-buffers, succinate-buffers, acetate-buffers, phosphate-buffers, formate buffers, benzoate buffers, TRIS (Tris(hydroxymethyl)-aminomethan) buffers or maleate buffers, or mixtures thereof), enzymes (such as for example but without limitation thermostable DNA polymerase), detectable labels, detection reagents, and control formulations (positive and/or negative), useful in the specified methods. Typically, the kits may also include instructions for use thereof, such as on a printed insert or on a computer readable medium. The terms may be used interchangeably with the term “article of manufacture”, which broadly encompasses any man-made tangible structural product, when used in the present context.

[0822] The present application also provides aspects and embodiments as set forth in the following numbered Statements:

[0823] Statement 1. An engineered system, the system comprising: a. one or more CRISPR-associated Tn7 transposase polypeptides; b. one or more Type I-B Cas proteins; and c. a guide molecule capable of complexing with the Type I-B Cas protein and directing binding of the guide-Cas protein complex to a target polynucleotide.

[0824] Statement 2. The system of Statement 1, wherein the one or more CRISPR-associated Tn7 transposase polypeptides comprise TnsA, TnsB, TnsC, and/or TniQ.

[0825] Statement 3. The system of any one of proceeding Statements, wherein the Tn7 transposase polypeptides comprise TnsA, TnsB, TnsC, a first TniQ and a second TniQ, wherein the first and second TniQ are different.

[0826] Statement 4. The system of any one of proceeding Statements, wherein the Tn7 transposase polypeptides comprise comprises TnsA, TnsB, TnsC, and a TniQ.

[0827] Statement 5. The system of Statement 4, wherein the TniQ comprises a DNA-binding domain.

[0828] Statement 6. The system of Statement 5, wherein the DNA-binding domain is at C-terminus of the TniQ.

[0829] Statement 7. The system of any one of proceeding Statements, wherein the one or more CRISPR-associated Tn7 transposase polypeptides comprise TnsA, TnsB, TnsC, and/or TnsD.

[0830] Statement 8. The system of Statement 7, wherein the Tn7 transposase polypeptides comprise TnsA, TnsB, TnsC, a first TnsD and a second TnsD, wherein the first and second TnsD are different.

[0831] Statement 9. The system of Statement 7, wherein the Tn7 transposase comprises TnsA, TnsB, TnsC and a TnsD.

[0832] Statement 10. The system of Statement 9, wherein the TnsD comprises a DNA-binding domain.

[0833] Statement 11. The system of Statement 9 or 10, wherein the TnsA and TnsB are comprised in a single protein.

[0834] Statement 12. The system of Statement 9, 10, or 11, wherein the Tn7 transposase comprises: a. TnsA, TnsB, TnsC and TnsD1; b. TnsA, TnsB, TnsC and TnsD2; or c. TnsA, TnsB, TnsC, TnsD, and TnsD2.

[0835] Statement 13. The system of any one of proceeding Statements, wherein the one or more Type I-B Cas proteins comprises Cas5, Cas6, Cas7, and/or Cas 8.

[0836] Statement 14. The system of any one of proceeding Statements, wherein the one or more Type I-B Cas proteins comprises Cas 8b.

[0837] Statement 15. The system of Statement 14, wherein the Cas8b is Cas8b3.

[0838] Statement 16. The system of any one of proceeding Statements, wherein the one or more CRISPR-associated Tn7 transposase polypeptides and/or the one or more Type I-B Cas proteins are from or originated from Anabaena variabilis.

[0839] Statement 17. The system of any one of proceeding Statements, wherein the one or more Type I-B Cas proteins lacks nuclease activity.

[0840] Statement 18. The system of any one of proceeding Statements, further comprising a donor polynucleotide.

[0841] Statement 19. The system of Statement 18, wherein the donor polynucleotide comprises a polynucleotide insert, a left element sequence, and a right element sequence.

[0842] Statement 20. The system of Statement 18 or 19, wherein the donor polynucleotide: a. introduces one or more mutations to the target polynucleotide; b. corrects a premature stop codon in the target polynucleotide; c. disrupts a splicing site; d. restores a splicing site; or e. a combination thereof.

[0843] Statement 21. The system of Statement 20, wherein the one or more mutations introduced by the donor polynucleotide comprises substitutions, deletions, insertions, or a combination thereof.

[0844] Statement 22. The system of Statement 20 or 21, wherein the one or more mutations causes a shift in an open reading frame on the target polynucleotide.

[0845] Statement 23. The system of any one of Statements 18-22, wherein the donor polynucleotide is between 100 bases and 30 kb in length.

[0846] Statement 24. The system of any one of proceeding Statements, wherein the target polynucleotide comprises a protospacer adjacent motif (PAM).

[0847] Statement 25. The system of Statement 24, wherein the PAM is AT or ATG.

[0848] Statement 26. The system of Statement 25, wherein the donor polynucleotide is inserted to the target polynucleotide at a site no more than 80, no more 90, no more 100, no more 200, or no more 300 bp 3′ of the PAM.

[0849] Statement 27. The system of Statement 25 or 26, wherein the donor polynucleotide is inserted to the target polynucleotide at a site no more than 80, no more 90, no more 100, no more 200, or no more 300 bp 5′ of the PAM.

[0850] Statement 28. The system of any one of proceeding Statements, wherein the target polynucleotide is linear, circular, or genomic DNA.

[0851] Statement 29. The system of any one of proceeding Statements, wherein the one or more Tn7 transposase polypeptides is derived from a first species and the one or more Type I-B Cas proteins is derived from a second species different from the first species.

[0852] Statement 30. The system of Statement 29, comprising a first TnsD1 derived from the first species and a second TnsD2 derived from the second species.

[0853] Statement 31. The system of any one of proceeding Statements, wherein the one or more Tn7 transposase polypeptides comprises a transposase with activity of TnsA and TnsB.

[0854] Statement 32. The system of any one of proceeding Statements, further comprising a targeting moiety.

[0855] Statement 33. The system of any one of proceeding Statements, which comprises a plurality of guide molecules capable of directing binding of the guide-Cas protein complex to one or more target polynucleotides.

[0856] Statement 34. A system comprising one or more polynucleotides encoding: a. one or more CRISPR-associated Tn7 transposase polypeptides; b. one or more Type I-B Cas proteins; and c. a guide molecule capable of complexing with the Type I-B Cas protein and directing binding of the guide-Cas protein complex to a target polynucleotide.

[0857] Statement 35. The system of Statement 34, further comprising a donor polynucleotide.

[0858] Statement 36. The system of Statement 35, wherein the donor polynucleotide comprises a polynucleotide insert, a left element sequence, and a right element sequence.

[0859] Statement 37. The system of any one of Statements 34-36, comprising one or more polynucleotides or encoded products of the polynucleotides in one or more loci in Table 5.

[0860] Statement 38. The system of any one of Statements 34-37, wherein the one or more polynucleotides encode components (a)-(c) of any one of Statements 1-33.

[0861] Statement 39. The system of any one of Statements 34-38, wherein the one or more Type I-B Cas proteins comprises Cas5, Cas6, Cas7, and/or Cas 8.

[0862] Statement 40. The system of any one of Statements 34-39, wherein the system comprises a first polynucleotide encoding a first Cas6 and a second polynucleotide encoding a second Cas6.

[0863] Statement 41. A vector comprising the one or more polynucleotides of any one of Statements 34-40.

[0864] Statement 42. A engineered cell comprising the system of any one of Statements 1-40, or the vector of Statement 41.

[0865] Statement 43. The engineered cell of Statement 42, wherein the cell produces and/or secretes an endogenous or non-endogenous biological product or chemical compound.

[0866] Statement 44. The engineered cell of Statement 43, wherein the biological product is a protein or an RNA.

[0867] Statement 45. A cell line comprising the engineered cell of any one of Statements 42-44 and progeny thereof.

[0868] Statement 46. A plant or animal model comprising the engineered cell of any one of Statements 42-44 and progeny thereof.

[0869] Statement 47. A composition comprising the engineered cell of any one of Statements 42-44.

[0870] Statement 48. The composition of Statement 47, formulated for use as a therapeutic.

[0871] Statement 49. A biological product or chemical compound produced by the engineered cell of any one of Statements 42-44.

[0872] Statement 50. An engineered cell or progeny thereof, the cell being engineered by use of the system of any one of Statements 1-40.

[0873] Statement 51. The cell or progeny thereof of Statement 50 that is isolated.

[0874] Statement 52. The cell or progeny thereof of Statement 50 or 51 that is further used as a therapeutic.

[0875] Statement 53. The cell or progeny thereof of Statement 50, 51, or 52 from which a product is isolated.

[0876] Statement 54. A product produced by the cell or progeny thereof of Statement 50, 51, or 52.

[0877] Statement 55. The product of Statement 54, wherein the product is a protein or an RNA.

[0878] Statement 56. The protein of Statement 55, wherein the protein comprises a mutation.

[0879] Statement 57. A pharmaceutical composition for treatment of a disease or disorder, comprising the cell or progeny thereof of Statement 50, 51, or 52.

[0880] Statement 58. The pharmaceutical composition according to Statement 57, wherein the treatment results in genetic changes in one or more cells.

[0881] Statement 59. The pharmaceutical composition according to Statement 57 or 58, wherein the treatment results in correction of one or more defective genotypes.

[0882] Statement 60. The pharmaceutical composition according to Statement 57, 58, or 59, wherein the treatment results in improved phenotype.

[0883] Statement 61. The cell or progeny thereof of Statement 50, 51, or 52, wherein the cell comprises a mutation in a protein expressed from a gene comprising the target sequence.

[0884] Statement 62. The cell or progeny thereof of Statement 61, wherein the cell comprises deletion of a genomic region comprising the target sequence.

[0885] Statement 63. The cell or progeny thereof of any one of Statements 61-62, wherein the cell comprises integration of an exogenous sequence by homology-directed repair.

[0886] Statement 64. The cell or progeny thereof of any one of Statements 61-63, wherein the cell comprises decreased transcription of a gene associated with the target sequence.

[0887] Statement 65. The or progeny thereof of any one of Statements 61-64, wherein the cell comprises increased transcription of a gene associated with the target sequence.

[0888] Statement 66. The product of Statement 49, wherein the product is a mutated protein or product provided by a template.

[0889] Statement 67. A method of inserting a donor polynucleotide into a target polynucleotide in a cell, the method comprises introducing to the cell: a. one or more CRISPR-associated Tn7 transposase polypeptides or functional fragments thereof; b. one or more Type I-B Cas proteins; and c. a guide molecule capable of complexing with the Type I-B Cas protein and directing binding of the guide-Cas protein complex to a target polynucleotide.

[0890] Statement 68. The method of Statement 67, wherein the donor polynucleotide: a. introduces one or more mutations to the target polynucleotide; b. corrects a premature stop codon in the target polynucleotide; c. disrupts a splicing site; d. restores a splicing site; or e. a combination thereof.

[0891] 69. The method of Statement 68, wherein the one or more mutations introduced by the donor polynucleotide comprises substitutions, deletions, insertions, or a combination thereof.

[0892] Statement 70. The method of Statement 68 or 69, wherein the one or more mutations causes a shift in an open reading frame on the target polynucleotide.

[0893] Statement 71. The method of any one of Statements 67-70, wherein the donor polynucleotide is between 100 bases and 30 kb in length.

[0894] Statement 72. The method of any one of Statements 67-71, wherein one or more of components (a), (b), and (c) is expressed from a nucleic acid operably linked to a regulatory sequence.

[0895] Statement 73. The method of any one of Statements 67-72, wherein one or more of components (a), (b), and (c) is introduced in a particle.

[0896] Statement 74. The method of any one of Statements 67-73, wherein the particle comprises a ribonucleoprotein (RNP).

[0897] Statement 75. The method of any one of Statements 67-74, wherein the cell is a prokaryotic cell.

[0898] Statement 76. The method of any one of Statements 67-74, wherein the cell is a eukaryotic cell.

[0899] Statement 77. The method of any one of Statements 67-74, wherein the cell is a mammalian cell, a cell of a non-human primate, or a human cell.

[0900] Statement 78. The method of any one of Statements 67-74, wherein the cell is a plant cell.

[0901] Statement 79. The method of any one of Statements 67-78, wherein insertion of the donor polynucleotide into the target polynucleotide in the cell results in: a cell or population of cells comprising altered expression levels of one or more gene products; a cell or population of cells that produces and/or secrete an endogenous or non-endogenous biological product or chemical compound.

[0902] Statement 80. The method of any one of Statements 67-79, wherein the donor polynucleotide is inserted to a site no more than 80, no more 90, no more 100, no more 200, or no more 300 bp 3′ of a PAM on the target polynucleotide.

[0903] Statement 81. The method of any one of Statements 67-79, wherein the donor polynucleotide is inserted to a site no more than 80, no more 90, no more 100, no more 200, or no more 300 bp 5′ of a PAM on the target polynucleotide.

[0904] Statement 82. The method of any one of Statements 67-81, wherein the target polynucleotide is linear, circular, or genomic DNA.

### EXAMPLES

### Example 1—Exemplary CAST Systems

[0905] A construct of an exemplary Type I-B CAST system from locus CP000117 of Anabaena variabilis ATCC 29413 is shown in FIG. 1. The plasmids for expressing the CAST system are shown in FIG. 2. Detailed maps of the plasmids are shown in FIG. 3. The Sequences of the plasmids are shown in Table 6 below.

TABLE 6

| Plasmids | Sequences |
|---|---|
| pCascade_ | GGGGAATTGTGAGCGGATAACAATTCCCCTGTAGAAATAATTTTGTTTAACTTTAATAAGGAGATATACCATGGT |
| CP000117 | GCTTTAACATTAGATGTCGTTAGGCGTTGAGCANNNNNNNNNNNNNNNNNNNNNNNNNNNNNNNNNNNNNGTG |
| | CTTTAACATTAGATGTCGTTAGGCGTTGAGCAGATCCGAATTCGAGCTCGGCGCGCCTGCAGGTCGACAAGCTTG |
| | CGGCCGCATAATGCTTAAGTCGAACAGAAAGTAATCGTATTGTACACGGCCGCATAATCGAAATTAATACGACTC |
| | ACTATAGGGGAATTGTGAGCGGATAACAATTCCCCATCTTAGTATATTAGTTAAGTATAAGAAGGAGATATACAT |
| | atgattattgatagtaacttagttacgcagcttccctcagaatcatcttcaaagccaagagagcttttaatgtctcagtttccatatatggatttaacttttagccttacgggtgagacattacctttcg |
| | accacggctatgaattattttctgcgatcgcccactttgaacccaaactacatacattagacacgttgggaattcagaccattgcaggtattcccaaggatggtgtaattaatctgacccaaaatt |
| | ctaggcttcgtattcggataccagtaaatcaggtacgtttggtttatccattggcgggtaagtcactgagaattggcaagcatacaattcgtttgggtattcctgacatctgtttgcttcaacctgc |
| | ggagaaactgcgatcgcgcattgtggtaataagaggctatgaagaacctgaaagttttttagtcgtagcgcagcgtcagctagaacaactgggtatccaagcaattgctagcattcccacca |
| | aagccaatggcaaaccaatacgtaggactatcaaaattaagcgatttacagtcgtgggttttggattagaagttataaatttaagcgatgaagactcactgaggttgcaaatacatggtgtagg |
| | aggaaagcaaaagatgggttgtggactcttcatgcctattaaggaaaggcaatagcaattactcgaaagcagatgatgaagagagcagataaccccaaaattcagcttaatctcggcgatc |
| | ctagtatgactttattgcatcgtgctggggttgcaggactttggatgacgctcaaaaaactggaaaaaatctatccaacacctgctgaacgtattggtaatttaacttggttgctaacccctcact |
| | atatcaatcttgattgggaaggacaggatttcacagttttagactggttgctgaagcaatcatttcaaatcagcgatgagggtttaatttccctgacagggttagattctcaaaacatggatattca |
| | aaatcaaataattatccatcaaggtatcacagccacttttacacaacataataaattttttaagtctgcgggtcaacaatctaagcaactaattattgatggtattcaggttagggttgattataaga |
| | aagctgcttcctatgctcatcaacattttgctaaacatttatgtgaccagtacggacaattgctaaaagagccaattggtatcaggggatggctctatccaggagcagtagttcgccattatgctt |
| | ttaaagaacaaacagcatttgaagaaaaagcagaatatgctctagcgttgttgttcgctcctatggcttgtcaatattttgtgctgcgatcgcacaccgaaccatcacatacaaactatgttttggt |
| | tattcctgaagtaattgatttagaactttatgcacattttttgtggtgtttgggtaacttagattataaacattttcacgtatctagcttaggagatgctggattaaaatttcttaattataaaacaacac |
| | aaatgcctacttccaattttttaaaacgatgtcaaataatcttttttagtacaaaagcttggtcagaacagcaaaaaactcgtgcagaaatagcaatcatagaattaaattcttcagttaattatctttat |
| | aagcttagttgtatttgttttccagaatgtcaaattgttttatataaaaatcaacattatttgcttccaagtttaataaaaggaataatcgccaataatctagcaatgggtcggtcttggtgggctaatt |
| | ggatttcatttattaaaaaaaaaaatcatttaaacaatttactgatgagtataaaggaattaataagatgattcaggactcagaatgggatatagaagctcaaaagctatttattcaagcttgtcat |
| | gaagcattaagaaaaatatatgccaaaatttatagcagaacaaaagaaggtgaatacgctcaaatagaacgagaaaatacacgcattttatctcagttaaaacgctgcaccaatactgacaat |
| | ttccgaaaatttattgcagagttttggggaagggcagggcaaatagcaattctggaagaacattggatggaattacttccattgactacagggataggcaattggaaagtggccagggactta |
| | acttttattgcaatggctagctacccaaagaataaaataacagaggtagaggtaaaaccatcacaaatatcggagctaaatactgaataaacttcatattttttgatttgattaagaacaaaatatt |
| | aattgtttaggtaatggtggaatgtttcatctgtttggtaatattttgactagttatggaaccgccgctaataatcgtggtgaaaatgaaggtaataccactacgttacaaaaattaatttggaaagg |
| | tgaagttcactctactgtttcatctgaggcaattcgttgggcattgcgatattattggcaaaatgctggctatcctgtgaatagacgttgggatgaaaatgctcaaccagtacccgatcacatctt |
| | gcaagatcctaattttgatgatattcgcttcattgatgatgatgtcttgggatttatgcaagcggaagcagcaaaagttgaagcagcagttgaatccgaagttgaaatccagaactcaactcaag |
| | atgaggacaaaaaactttctcaaggtaaggagaaagaaactgcaaaacgtaagcgtaaggaaaaacctaaagggaaaataactactagacgaggtgtattagaagtcactcgtgcagtttc |
| | aacaattccttatgctggtgatcttactttcaatgctatgagtggaaagaaaggacgaacatctctttattctacagaagttcatgctactcgatatcaatatggcttcgcattaacacccaatagc |
| | ctcaaagataaatctcgcattaatgctgtcctcgatagcttaatttctattggagaagtggcaggaaatcacgctcgttttctctatgatttttctcctgatagcatcatattacggtggacacacgat |
| | ttctcacctcggttactttactgttttgaagaagatgaacttagaaatatatcaacaccggatttagtaaggcgggtagaatctggagatatagaccctaaagaattatggataggaggggcaat |
| | ttctagcactctggaagatttaggggcaaatgtgtttcccggagtgaagacaacagttgaagcattaaaacaggtgattattgaagatttgcagttgtcgttaaggagttcatgatatgacgaca |
| | attgccttaaaagtagaagttcccatagcttgttttcggcagtctcgtgctagggaatatggcgaaacttaccctgtaccaccaccatcgacagtatatggaatgttactatctcttgttggagaa |
| | gtggatagatacaaacactgcggtgtgaagctggcgatcgcacttctatctgaaccagaaaagtcaactgttattcgcacctttcaccgatttaagacgaagaatatccatgactctaaaaata |
| | ataaacctgattatcaggagttattaactaatatagaatttatagtttgggtggatgctggagtagataaagctaaaccaaatttagtggaacgtttagcagaggcattgactaacccggcttctat |
| | taataggtttggtggattatgtttaggtgaaagtcgggatttagtgaatgatgttacccttttacctaaaaattactatgcagaatcaatgcgatggttaattcgagatgaatatgggttactaacttt |
| | accttactgggtagaccatgtaggttcgcggggaacgcgatggctacgttacgagattcagaaatgtccagtctttcaaccacctgaattatcttggacttcagttcaaagtaattagCCTA |
| | GGCTGCTGCCACCGCTGAGCAATAACTAGCATAACCCCTTGGGGCCTCTAAACGGGTCTTGAGGGGTTTTTTGCT |
| | GAAACCTCAGGCATTTGAGAAGCACACGGTCACACTGCTTCCGGTAGTCAATAAACCGGTAAACCAGCAATAGA |
| | CATAAGCGGCTATTTAACGACCCTGCCCTGAACCGACGACCGGGTCATCGTGGCCGGATCTTGCGGCCCCTCGGC |
| | TTGAACGAATTGTTAGACATTATTTGCCGACTACCTTGGTGATCTCGCCTTTCACGTAGTGGACAAATTCTTCCAA |
| | CTGATCTGCGCGCGAGGCCAAGCGATCTTCTTCTTGTCCAAGATAAGCCTGTCTAGCTTCAAGTATGACGGGCTG |
| | ATACTGGGCCGGCAGGCGCTCCATTGCCCAGTCGGCAGCGACATCCTTCGGCGCGATTTTGCCGGTTACTGCGCT |
| | GTACCAAATGCGGGACAACGTAAGCACTACATTTCGCTCATCGCCAGCCCAGTCGGGCGGCGAGTTCCATAGCGT |
| | TAAGGTTTCATTTAGCGCCTCAAATAGATCCTGTTCAGGAACCGGATCAAAGAGTTCCTCCGCCGCTGGACCTAC |
| | CAAGGCAACGCTATGTTCTCTTGCTTTTGTCAGCAAGATAGCCAGATCAATGTCGATCGTGGCTGGCTCGAAGAT |
| | ACCTGCAAGAATGTCATTGCGCTGCCATTCTCCAAATTGCAGTTCGCGCTTAGCTGGATAACGCCACGGAATGAT |
| | GTCGTCGTGCACAACAATGGTGACTTCTACAGCGCGGAGAATCTCGCTCTCTCCAGGGGAAGCCGAAGTTTCCAA |
| | AAGGTCGTTGATCAAAGCTCGCCGCGTTGTTTCATCAAGCCTTACGGTCACCGTAACCAGCAAATCAATATCACT |
| | GTGTGGCTTCAGGCCGCCATCCACTGCGGAGCCGTACAAATGTACGGCCAGCAACGTCGGTTCGAGATGGCGCTC |
| | GATGACGCCAACTACCTCTGATAGTTGAGTCGATACTTCGGCGATCACCGCTTCCCTCATACTCTTCCTTTTTCAA |
| | TATTATTGAAGCATTTATCAGGGTTATTGTCTCATGAGCGGATACATATTTGAATGTATTTAGAAAAATAAACAAA |
| | TAGCTAGCTCACTCGGTCGCTACGCTCCGGGCGTGAGACTGCGGCGGGCGCTGCGGACACATACAAAGTTACCCA |
| | CAGATTCCGTGGATAAGCAGGGGACTAACATGTGAGGCAAAACAGCAGGGCCGCGCCGGTGGCGTTTTTCCATA |
| | GGCTCCGCCCTCCTGCCAGAGTTCACATAAACAGACGCTTTTCCGGTGCATCTGTGGGAGCCGTGAGGCTCAACC |
| | ATGAATCTGACAGTACGGGCGAAACCCGACAGGACTTAAAGATCCCCACCGTTTCCGGCGGGTCGCTCCCTCTTG |
| | CGCTCTCCTGTTCCGACCCTGCCGTTTACCGGATACCTGTTCCGCCTTTCTCCCTTACGGGAAGTGTGGCGCTTTCT |
| | CATAGCTCACACACTGGTATCTCGGCTCGGTGTAGGTCGTTCGCTCCAAGCTGGGCTGTAAGCAAGAACTCCCCG |
| | TTCAGCCCGACTGCTGCGCCTTATCCGGTAACTGTTCACTTGAGTCCAACCCGGAAAAGCACGGTAAAACGCCAC |
| | TGGCAGCAGCCATTGGTAACTGGGAGTTCGCAGAGGATTTGTTTAGCTAAACACGCGGTTGCTCTTGAAGTGTGC |
| | GCCAAAGTCCGGCTACACTGGAAGGACAGATTTGGTTGCTGTGCTCTGCGAAAGCCAGTTACCACGGTTAAGCAG |
| | TTCCCCAACTGACTTAACCTTCGATCAAACCACCTCCCCAGGTGGTTTTTTCGTTTACAGGGCAAAAGATTACGCG |
| | CAGAAAAAAAGGATCTCAAGAAGATCCTTTGATCTTTTCTACTGAACCGCTCTAGATTTCAGTGCAATTTATCTCT |
| | TCAAATGTAGCACCTGAAGTCAGCCCCATACGATATAAGTTGTAATTCTCATGTTAGTCATGCCCCGCGCCCACC |
| | GGAAGGAGCTGACTGGGTTGAAGGCTCTCAAGGGCATCGGTCGAGATCCCGGTGCCTAATGAGTGAGCTAACTT |
| | ACATTAATTGCGTTGCGCTCACTGCCCGCTTTCCAGTCGGGAAACCTGTCGTGCCAGCTGCATTAATGAATCGGCC |
| | AACGCGCGGGGAGAGGCGGTTTGCGTATTGGGCGCCAGGGTGGTTTTTCTTTTCACCAGTGAGACGGGCAACAGC |
| | TGATTGCCCTTCACCGCCTGGCCCTGAGAGAGTTGCAGCAAGCGGTCCACGCTGGTTTGCCCCAGCAGGCGAAAA |
| | TCCTGTTTGATGGTGGTTAACGGCGGGATATAACATGAGCTGTCTTCGGTATCGTCGTATCCCACTACCGAGATGT |
| | CCGCACCAACGCGCAGCCCGGACTCGGTAATGGCGCGCATTGCGCCCAGCGCCATCTGATCGTTGGCAACCAGCA |
| | TCGCAGTGGGAACGATGCCCTCATTCAGCATTTGCATGGTTTGTTGAAAACCGGACATGGCACTCCAGTCGCCTT |
| | CCCGTTCCGCTATCGGCTGAATTTGATTGCGAGTGAGATATTTATGCCAGCCAGCCAGACGCAGACGCGCCGAGA |
| | CAGAACTTAATGGGCCCGCTAACAGCGCGATTTGCTGGTGACCCAATGCGACCAGATGCTCCACGCCCAGTCGCG |
| | TACCGTCTTCATGGGAGAAAATAATACTGTTGATGGGTGTCTGGTCAGAGACATCAAGAAATAACGCCGGAACAT |
| | TAGTGCAGGCAGCTTCCACAGCAATGGCATCCTGGTCATCCAGCGGATAGTTAATGATCAGCCCACTGACGCGTT |
| | GCGCGAGAAGATTGTGCACCGCCGCTTTACAGGCTTCGACGCCGCTTCGTTCTACCATCGACACCACCACGCTGG |
| | CACCCAGTTGATCGGCGCGAGATTTAATCGCCGCGACAATTTGCGACGGCGCGTGCAGGGCCAGACTGGAGGTG |
| | GCAACGCCAATCAGCAACGACTGTTTGCCCGCCAGTTGTTGTGCCACGCGGTTGGGAATGTAATTCAGCTCCGCC |
| | ATCGCCGCTTCCACTTTTTCCCGCGTTTTCGCAGAAACGTGGCTGGCCTGGTTCACCACGCGGGAAACGGTCTGAT |
| | AAGAGACACCGGCATACTCTGCGACATCGTATAACGTTACTGGTTTCACATTCACCACCCTGAATTGACTCTCTTC |
| | CGGGCGCTATCATGCCATACCGCGAAAGGTTTTGCGCCATTCGATGGTGTCCGGGATCTCGACGCTCTCCCTTATG |
| | CGACTCCTGCATTAGGAAATTAATACGACTCACTATA (SEQ ID NO: 44) |
| pDonor_ | AGCTTGCCATTGCAACTATTGGCTTACCACATCGCCGCCCGTCGCGGTTTGGATGTCGATCAGCCTCGGAATTTAG |
| CP000117 | CAAAATCAGTGACTGTGGAATAAATAAATGTGGAGGAATAATTCGGTTCAACAATATATAATTCGGTTCAACAAT |
| | TAATAAAACGATTGAACAATAACCTCTAAAGGAGTACGATTGTACCAAGTAAAAGTGCGATCGCTTCCAGAGGTT |
| | ATTTTTATGGTTAGGGGTAGAAGGGAATGGCGGGGATCCATGGAGAAAAAAATCACTGGATATACCACCGTTGA |
| | TATATCCCAATGGCATCGTAAAGAACATTTTGAGGCATTTCAGTCAGTTGCTCAATGTACCTATAACCAGACCGTT |
| | CAGCTGGATATTACGGCCTTTTTAAAGACCGTAAAGAAAAATAAGCACAAGTTTTATCCGGCCTTTATTCACATTC |
| | TTGCCCGCCTGATGAATGCTCATCCGGAGTTCCGTATGGCAATGAAAGACGGTGAGCTGGTGATATGGGATAGTG |
| | TTCACCCTTGTTACACCGTTTTCCATGAGCAAACTGAAACGTTTTCATCGCTCTGGAGTGAATACCACGACGATTT |
| | CCGGCAGTTTCTACACATATATTCGCAAGATGTGGCGTGTTACGGTGAAAACCTGGCCTATTTCCCTAAAGGGTTT |
| | ATTGAGAATATGTTTTTCGTCTCAGCCAATCCCTGGGTGAGTTTCACCAGTTTTGATTTAAACGTGGCCAATATGG |
| | ACAACTTCTTCGCCCCCGTTTTCACTATGGGCAAATATTATACGCAAGGCGACAAGGTGCTGATGCCGCTGGCGA |
| | TTCAGGTTCATCATGCCGTTTGTGATGGCTTCCATGTCGGCAGAATGCTTAATGAATTACAACAGTACTGCGATGA |
| | GTGGCAGGGCGGGGCGTAATTTTTTTAAGGCAGTTATTGGTGCCCTTCTAGAGTCCCGGGATATTTACGTTTTGTA |
| | ATCACGAATAGATTCTTGATTGCAAGATGAATTGCGATCGCATCTTTGTCGCACAGCAGAACTTTCTCAAATAATT |
| | TTGAACTTATGGAATTACTCAAAACCTTTATCAGTAATGGATTCAAACAATTGTTTAACCGTTTTATTTGAGATTTT |
| | TACTAAAAATCAAGTTTACCATAGAGGTTAAGCTGAAATTGTTCAATCGTTTTATTTTATCGACAACGGCAGATTA |
| | AATATTCGAACTGTAATAATTGTTTAACCGAATTCTTTGTCTACAAATATTTGTAGAGTAGATAAGATAATTTCTA |
| | GATGTGACTACTATATCACATCTAGGTACCGAGCTCGAATTCACTGGCCGTCGTTTTACAACGTCGTGACTGGGA |
| | AAACCCTGGCGTTACCCAACTTAATCGCCTTGCAGCACATCCCCCTTTCGCCAGCTGGCGTAATAGCGAAGAGGC |
| | CCGCACCGATCGCCCTTCCCAACAGTTGCGCAGCCTGAATGGCGAATGGCGCCTGATGCGGTATTTTCTCCTTACG |
| | CATCTGTGCGGTATTTCACACCGCATATGGTGCACTCTCAGTACAATCTGCTCTGATGCCGCATAGTTAAGCCAGC |
| | CCCGACACCCGCCAACACCCGCTGACGCGCCCTGACGGGCTTGTCTGCTCCCGGCATCCGCTTACAGACAAGCTG |
| | TGACCGTCTCCGGGAGCTGCATGTGTCAGAGGTTTTCACCGTCATCACCGAAACGCGCGAGACGAAAGGGCCTCG |
| | TGATACGCCTATTTTTATAGGTTAATGTCATGATAATAATGGTTTCTTAGACGTCAGGTGGCACTTTTCGGGGAAA |
| | TGTGCGCGGAACCCCTATTTGTTTATTTTTCTAAATACATTCAAATATGTATCCGCTCATGAGACAATAACCCTGA |
| | TAAATGCTTCAATAATATTGAAAAAGGAAGAGTATGAGTATTCAACATTTCCGTGTCGCCCTTATTCCCTTTTTTG |
| | CGGCATTTTGCCTTCCTGTTTTTGCTCACCCAGAAACGCTGGTGAAAGTAAAAGATGCTGAAGATCAGTTGGGTG |
| | CACGAGTGGGTTACATCGAACTGGATCTCAACAGCGGTAAGATCCTTGAGAGTTTTCGCCCCGAAGAACGTTTTC |
| | CAATGATGAGCACTTTTAAAGTTCTGCTATGTGGCGCGGTATTATCCCGTATTGACGCCGGGCAAGAGCAACTCG |
| | GTCGCCGCATACACTATTCTCAGAATGACTTGGTTGAGTACTCACCAGTCACAGAAAAGCATCTTACGGATGGCA |
| | TGACAGTAAGAGAATTATGCAGTGCTGCCATAACCATGAGTGATAACACTGCGGCCAACTTACTTCTGACAACGA |
| | TCGGAGGACCGAAGGAGCTAACCGCTTTTTTGCACAACATGGGGGATCATGTAACTCGCCTTGATCGTTGGGAAC |
| | CGGAGCTGAATGAAGCCATACCAAACGACGAGCGTGACACCACGATGCCTGTAGCAATGGCAACAACGTTGCGC |
| | AAACTATTAACTGGCGAACTACTTACTCTAGCTTCCCGGCAACAATTAATAGACTGGATGGAGGCGGATAAAGTT |
| | GCAGGACCACTTCTGCGCTCGGCCCTTCCGGCTGGCTGGTTTATTGCTGATAAATCTGGAGCCGGTGAGCGTGGG |
| | TCTCGCGGTATCATTGCAGCACTGGGGCCAGATGGTAAGCCCTCCCGTATCGTAGTTATCTACACGACGGGGAGT |
| | CAGGCAACTATGGATGAACGAAATAGACAGATCGCTGAGATAGGTGCCTCACTGATTAAGCATTGGTAACTGTC |
| | AGACCAAGTTTACTCATATATACTTTAGATTGATTTAAAACTTCATTTTTAATTTAAAAGGATCTAGGTGAAGATC |
| | CTTTTTGATAATCTCATGACCAAAATCCCTTAACGTGAGTTTTCGTTCCACTGAGCGTCAGACCCCGTAGAAAAGA |
| | TCAAAGGATCTTCTTGAGATCCTTTTTTTCTGCGCGTAATCTGCTGCTTGCAAACAAAAAAACCACCGCTACCAGC |
| | GGTGGTTTGTTTGCCGGATCAAGAGCTACCAACTCTTTTTCCGAAGGTAACTGGCTTCAGCAGAGCGCAGATACC |
| | AAATACTGTTCTTCTAGTGTAGCCGTAGTTAGGCCACCACTTCAAGAACTCTGTAGCACCGCCTACATACCTCGCT |
| | CTGCTAATCCTGTTACCAGTGGCTGCTGCCAGTGGCGATAAGTCGTGTCTTACCGGGTTGGACTCAAGACGATAG |
| | TTACCGGATAAGGCGCAGCGGTCGGGCTGAACGGGGGGTTCGTGCACACAGCCCAGCTTGGAGCGAACGACCTA |
| | CACCGAACTGAGATACCTACAGCGTGAGCTATGAGAAAGCGCCACGCTTCCCGAAGGGAGAAAGGCGGACAGGT |
| | ATCCGGTAAGCGGCAGGGTCGGAACAGGAGAGCGCACGAGGGAGCTTCCAGGGGGAAACGCCTGGTATCTTTAT |
| | AGTCCTGTCGGGTTTCGCCACCTCTGACTTGAGCGTCGATTTTTGTGATGCTCGTCAGGGGGGCGGAGCCTATGGA |
| | AAAACGCCAGCAACGCGGCCTTTTTACGGTTCCTGGCCTTTTGCTGGCCTTTTGCTCACATGTTCTTTCCTGCGTTA |
| | TCCCCTGATTCTGTGGATAACCGTATTACCGCCTTTGAGTGAGCTGATACCGCTCGCCGCAGCCGAACGACCGAG |
| | CGCAGCGAGTCAGTGAGCGAGGAAGCGGAAGAGCGCCCAATACGCAAACCGCCTCTCCCCGCGCGTTGGCCGAT |
| | TCATTAATGCAGCTGGCACGACAGGTTTCCCGACTGGAAAGCGGGCAGTGAGCGCAACGCAATTAATGTGAGTT |
| | AGCTCACTCATTAGGCACCCCAGGCTTTACACTTTATGCTTCCGGCTCGTATGTTGTGTGGAATTGTGAGCGGATA |
| | ACAATTTCACACAGGAAACAGCTATGACCATGATTACGCCA (SEQ ID NO: 45) |
| pTns_CPO | ggggaattgtgagcggataacaattcccctgtagaaataattttgtttaactttaataaggagatataccatggttaggggtagaagggaatggactcaagctaaatatgagcgatatataaaa |
| 00117 | gaaggtcgtggccgaggaagtggtaagcactataaaccttggcttacaatccaagatgttccctctaaaggacgttcttctagaactcctggttggaaaacaaatcgagtacatcatttcttctc |
| | agaccatgaaaaacggctattttatttgtttgagtggtcagatatagtcacagatataagagagcaatttcctttagacaatctcgatctagccatgagtattgctacagacataggtataaagtac |
| | cctgtagatacacaaagtggcactcctcacgttttaacaagcgactttatgcttacagtcaaccgcgatgggaagcagatgcagattgcccggactgttaagccgtcaacagaactggagaa |
| | aaagcaagttaatgagaaattcgagatagaaagacaatattacttagcaaagggtattgactggggaattatcacagaaaaagaaattcccaggcttttagctgaaaatgttgagtgggttcat |
| | tctgcttataggctagaagcaaattctgaaatggacactgcacaactgagtgaattgtcaacaattttaaaatctaagcttcaggaagaagatacaactataaatagagtaactactgctttaga |
| | caaagaaatgaatataaattccggtacatcactttatgtatttaaacatttaattgctaggaaagaaatccttgtggatctagtagcaataaaattatctgcttgtccgtcaactaaagttattgaaaa |
| | aataatattttagacccacatgataggtaaataatatggttaaagatttatttgtcaatgatttaatagagtggattgtataccaaaacactcatatagtcgaaagaattatttggatagatgaaggtt |
| | acattattgcatttgttatagatattaatgctaagaaaggtctacctgaaccaaggaaaatatcagatattttagaagctataactgaaggtattgcttttaagcagcaacaagatccttgggcaag |
| | aattattcgggatgaaaatttgacagataaggaaaaggaatacagagataaagcttgggagataatttcatcattaattatagaagaaccatcaatatattatagaaattttagaggatcgatggt |
| | taaagaagcggttgaaaagtacaacgaagaaagggataaagataaattagtagaaaaaaccgtctatggttatttgagaagattttggcagagaggaaaaactataaatgctctcatacctg |
| | attttatcaattcatcaggtaagggcaagattcgaggacaatcgggcaagaagagaggaagaccaagaaaatatgcacatgacccagatattggtgaaggtgtaaatgttacagaagaag |
| | atagaaagatttttagagtatctataagcaaattttacaataatccaaaagaaaactacttaacaacagcctatgaattaatggtgaaagaatattacaaggaaggaattagatatgacgagaat |
| | ggtgttcaaaaatctatattaaccccaactgataaaatacctacaattactcaattcaaatactggtatcaacttgaacaggatgatgttaccaaaactttaacatctcgaaaaggagccaagcg |
| | agtagctttagagaatagagcaattttgggaaactctaagatggaaactattggccctggttctagatatcaaattgatgccacagttgctgatgtatatttagtttcaaaatataaccgtgactgg |
| | ataattggtagaccagttatctatgtaattattgatgtttttagtagaatgattacaggtgtttatgtcggtttagaaggcccatcttggataggagcaatgatggcactagccaatgtagctacaga |
| | taaaaccctgttttgccaggaatataacattaatattactgaaaatgaatggccttgcaatcaaatgccagatgcaattttaggagataggggagaattagcaggtatgacagtagaaacattaa |
| | tccctaatctttatgttcgtattgaaaatgcagcttcctatagagcagattggaaagggttagtagaaagacactttcgtataattcatgaatatgtaaaaccttttttacctggttatgtggatacgg |
| | attttaggcaaagaggtgcaagggattataggcttgatggcaaacttgatatagatcaatttactgagattattattcgtttaattgttcaccataacaataaacctcttactgaatatgaaagagat |
| | gaagcaatgattgctgatgatacccctcctatacctagagagttgtggaagtggggtatcgccaatcgttctggcagactcagaactttttctgaagatattgtcaaattgaacttgatgcctact |
| | gagaaagcaactattactgctaaaggcatcaaaatgagaggtaaggagatgtactatacctgtgatagtgctaaaaatgagcaatggtttgaaaaagctagaagtaatctcctttctaagtcag |
| | aaaaatcattgattgtatcttatgacatcagaaagccaaacttcatttatcttccatctagtgatggtagagattttgaaaaatgttttcttattgacttagaagggcggtatgctaataaaaactttca |
| | tgatattgaatatctgcttgcttatgaagaattgcaaagacagaaaagccaaggtaaacagctacaagaaaaggtagatttaatagctgatattgaaagcatagtagatagagcagaaaaaat |
| | gactgatgcttctcaatatcataatttaagtaagagcaagaaagtttctggaataagagataatagggcttttgaaaaggctaaacgacgagagaatgaaggatttgaattagcaattacagat |
| | aatcagagcagttttcaggttgcagagagtacagcagaaacctccgaacagccagaatcactacagccaaaccatctgaatcttcttaagaaaaagcgacaggagcgaaaacgtggaca |
| | gaattgagagtgaactggttaaaattcctaatggagaactagcagttattgccagatatatagatcaaaaactgccagaatacaacactaatccattaattcaggcattacctcctatcctatcag |
| | cagcagaatttatagataaagtagccagagaaccaaattttgatgaacaagagagagagctagaaccacattatagatttcattgtattgagaggttatctagatattttgaccctcaaaataaa |
| | actcttgaattacaaaaagttatttgtacgcttatcatgacaggctatctgtcaaggaaccttttaaaacctgaatatgcaaatcgctctaggcaaatttataatgcaataggtaatggaggaggta |
| | aaaatttagaaaactatgttaatcttcctacatctgcgtccggcttaactctaattggcccatcaggtattggaaagactacaaatttcaaaaatattcttgagctttatccccaaataatttttcatcc |
| | tgattatagtgtttaccaaatagtttggctgcgggtagattgccctaaaactttaaaggggttatgtatagatacttttgcaggtatcgataaattgttaggaactaatttattaaagaaatttaaccc |
| | agcacgcacatctgaagattatctattggctcaacttgcacaaacagcacacactcatcatctaggagttttggtgattgatgaaatacaaaatttagcaactgcaaaaagaaatagagacgaa |
| | atattaaattttttagtaaagctcgataatactattggaattccagttattcgtgtaggtacgaatgaagccattagttttcttcaaggtaatcttagaaatgctagaagaaatactggagaaggaag |
| | tagaatgtgggatagaatggtaaataatgatgaatggtgttactttttagaaggaatatgggaataccaatggacaaaaacacctgttcatttctcggatgaaataaaagaagttttttatgatga |
| | aagccagggaattattgatattgctataaaactttacaaaatggttcaatggagagcgatttcaataggtgaccaagaaattattacggttgatctgattcgtcaagtagctaaagaaggattgta |
| | tttagtaaagccaatgctagatgcaattaggttaggggacagagagtggatgattaaatataaggatattgctcctctcgatattacggaatatcacaatagatgtgtatctgagattgatgctaa |
| | agatttgacagagattaagagattagctaaaaagcagcagaatcagcagaaagtatctccgaagctcaattatgtaattagtgagctgttgaaattggaagtagaatctggtaaagcaaagga |
| | atgtgcagaacaaattgtttatagtcatgaagatccagacattccaattccatctttagttaataaggcatatgctcttgctttgcaaggatgtcaagtaaatgagagtcttgctaaaacaagtacc |
| | aggaaagctaaattaaagacaaagtaccaagagaatgatattcggcgaattgtcgagaatgccaagaaagacaaaaaatctgcatacgaggatttgaaattagcaggtataatcaaaaatc |
| | cagttgaagattttatcaatatttagcttctaaatgcttagttttttcccaactctgtatcccgatgaacttttatatagcactttagctagataccatattcggagtggaaataaaagtttcaagcaaac |
| | tgacttagagctattcggttacagttcccaacaaatatgcaaaattaccttaactaataatttaaattatttagtgaaaaacttacctttacgctcccagcaaaaagttgagaatttactacaaaatca |
| | tactttatattccttttatgcaactttattaatgccgcaggaggcttggctgctgaaaaactcaatgagtaataaattcagtgggtctatactagattttgctaaagtggctaataattctagtgatgat |
| | tcaaaaaaatttttaaaattttgccctgaatgtttagagaaagatacccaaaagtatggtgaaccttactggcatagaatacatcaagtccctggcattttagtttgtccaattcatcgtgttgttttac |
| | acaatagctgtatagaagttgaatcgaaaggcatacattatcatgctgccagcatagataattgtttattagcaaataatgtgaaaaaattgacaaataaaactgtagaaacactttcaatactgg |
| | cacatgatattaattggctaattcatagcagttttgcctttcaaggtttggcttggcttcgcgctcagtaccagcgttacttattggataaaggactgctaaaaacctttgctggtggcaagtttaag |
| | tttaatgattgtggttttgcccagcttatatttgagttttatggtcaagaatccttagaagccctcaatccaaagctgacccaaaatcaaggtaaatatttttctcactgcttgtttggatgcgacttaa |
| | acccagcaattgaccgcataactcatatcttaatgataaaatttttagcaaattctatagaagagttctttcagtcataacttaagtcgaacagaaagtaatcgtattgtacacggccgcataatcg |
| | aaattaatacgactcactataggggaattgtgagcggataacaattccccatcttagtatattagttaagtataagaaggagatatacatggtgagttttttccctcaaccttatccagatgaaattt |
| | tatatagtgttattgctcgttatcacattagaagtggcaatacgagtccaaaaattacattacaagatttatttaagtcacagactactgtggcgacagtagatttaccatcgaaccttagtaatttaa |
| | ttaaaaacctacaatttatctcaaattaccaagttgaagagttgatatataaacatactctctaccctttatatagcccttttttgccagcaaacaggtctagtcaggtactggaatctatgaaagga |
| | gattatgggggagatattcatacaagagccggaattatggcaagctcaattactatgccgaaatatttgcggttttgtccaacttgctgggaagaagacttaaaaaattatggcgaaccttactg |
| | gcatcgcatccatcaaataccagggattttagtttgtccatttcatggtgaagttttgcaagatagcctagctcctttacatggttttaataagcatgaatattatgcagctagtacagacaactgttc |
| | tattactaaagaacccagtattcttagccctgacacactgaaaaaattactaatattagccaaagatttttggtggttactcaatagtgaaataccttgccaagagccacagtggtttcgcaaaca |
| | gtacacaaatctgatgattgagcagggttttgcaactccaactggtcgaatttaccagaacaaactactagataattttttgttcttttatggtcaagaaatgctcagtgctgttgattcaatggtaa |
| | atcataatgattcaaacaactgggttactagcatcgtcaggaaatataggaaatctttccatcctcttagacatctgctaatgatgcgttttttgaaaacatcagtagaggaattttttcaaaaagat |
| | actgaatacaagccttttggcgaacccccctggttgtgtctcaatgctgccgcagaacattatctacaaccagtgattaccaatttagtcattactttatgctgcgatacaaaaaagcctgtcggt |
| | actttttcttgtgcttgcggaatggtttattgccggactgggcctgatgaaacggatgaagacaaagttcgcattggtaaagtcaaggcattcggtcaaatatgggagcaaaagctgaaagaa |
| | ttggtggaagttgaaaagttgggtttgcgggagacagccagaagattaaatgttgatgccagaactatcaaacgttatgtatctcgtctaaaattgacaacttattggcagactagaacagaaa |
| | atgactctgtaggcttacagggagtcccagaaatagatcccaattttgcaactgaactcaaattaaaacacaggcaaaattggatggctttacaagtacagaaccctgaagcttcaaagacaa |
| | ctctgagaaaactagtaccagccacctatatttggctatacaggaatgacagagaatggctcaatcaaaactcacccactttacaagttgccgttccttccgttgtgagagttgattggcatgag |
| | cgagatcagcaaattctcgctcaggttcaagatgcagtgcgatcgctacttaaggctgatataccagagaaaatttctattagtagggtagggaaaactatcggcttacttgcattactcgaaa |
| | aacatctcgaccagatgcctttaacaaaggcttatttggaatcagtcgttgaaactgtagaagaatttcagatgcgccggatcaagtgggcaatcaagctgcttgatgaatgtggagaagaaa |
| | ttatgcgctggaaggtagtcagagttgctgctttgcgagaggattgctcccaaagagtcagtgcatttctggaaagtgaactggagaaagcatacaagaaagagaggtgattaattaaccta |
| | ggctgctgccaccgctgagcaataactagcataaccccttggggcctctaaacgggtcttgaggggttttttgctgaaacctcaggcatttgagaagcacacggtcacactgcttccggtagt |
| | caataaaccggtaaaccagcaatagacataagcggctatttaacgaccctgccctgaaccgacgacaagctgacgaccgggtctccgcaagtggcacttttcggggaaatgtgcgcgga |
| | acccctatttgtttatttttctaaatacattcaaatatgtatccgctcatgaattaattcttagaaaaactcatcgagcatcaaatgaaactgcaatttattcatatcaggattatcaataccatattttt |
| | gaaaaagccgtttctgtaatgaaggagaaaactcaccgaggcagttccataggatggcaagatcctggtatcggtctgcgattccgactcgtccaacatcaatacaacctattaatttcccctcgt |
| | caaaaataaggttatcaagtgagaaatcaccatgagtgacgactgaatccggtgagaatggcaaaagtttatgcatttctttccagacttgttcaacaggccagccattacgctcgtcatcaaa |
| | atcactcgcatcaaccaaaccgttattcattcgtgattgcgcctgagcgagacgaaatacgcggtcgctgttaaaaggacaattacaaacaggaatcgaatgcaaccggcgcaggaacact |
| | gccagcgcatcaacaatattttcacctgaatcaggatattcttctaatacctggaatgctgttttcccggggatcgcagtggtgagtaaccatgcatcatcaggagtacggataaaatgcttgat |
| | ggtcggaagaggcataaattccgtcagccagtttagtctgaccatctcatctgtaacatcattggcaacgctacctttgccatgtttcagaaacaactctggcgcatcgggcttcccatacaatc |
| | gatagattgtcgcacctgattgcccgacattatcgcgagcccatttatacccatataaatcagcatccatgttggaatttaatcgcggcctagagcaagacgtttcccgttgaatatggctcata |
| | ctcttcctttttcaatattattgaagcatttatcagggttattgtctcatgagcggatacatatttgaatgtatttagaaaaataaacaaataggcatgctagcgcagaaacgtcctagaagatgcca |
| | ggaggatacttagcagagagacaataaggccggagcgaagccgtttttccataggctccgcccccctgacgaacatcacgaaatctgacgctcaaatcagtggtggcgaaacccgacag |
| | gactataaagataccaggcgtttccccctgatggctccctcttgcgctctcctgttcccgtcctgcggcgtccgtgttgtggtggaggctttacccaaatcaccacgtcccgttccgtgtagac |
| | agttcgctccaagctgggctgtgtgcaagaaccccccgttcagcccgactgctgcgccttatccggtaactatcatcttgagtccaacccggaaagacacgacaaaacgccactggcagc |
| | agccattggtaactgagaattagtggatttagatatcgagagtcttgaagtggtggcctaacagaggctacactgaaaggacagtatttggtatctgcgctccactaaagccagttaccaggtt |
| | aagcagttccccaactgacttaaccttcgatcaaaccgcctccccaggcggttttttcgtttacagagcaggagattacgacgatcgtaaaaggatctcaagaagatcctttacggattcccga |
| | caccatcactctagatttcagtgcaatttatctcttcaaatgtagcacctgaagtcagccccatacgatataagttgtaattctcatgttagtcatgccccgcgcccaccggaaggagctgactg |
| | ggttgaaggctctcaagggcatcggtcgagatcccggtgcctaatgagtgagctaacttacattaattgcgttgcgctcactgcccgctttccagtcgggaaacctgtcgtgccagctgcatt |
| | aatgaatcggccaacgcgcggggagaggcggtttgcgtattgggcgccagggtggtttttcttttcaccagtgagacgggcaacagctgattgcccttcaccgcctggccctgagagagtt |
| | gcagcaagcggtccacgctggtttgccccagcaggcgaaaatcctgtttgatggtggttaacggcgggatataacatgagctgtcttcggtatcgtcgtatcccactaccgagatgtccgca |
| | ccaacgcgcagcccggactcggtaatggcgcgcattgcgcccagcgccatctgatcgttggcaaccagcatcgcagtgggaacgatgccctcattcagcatttgcatggtttgttgaaaac |
| | cggacatggcactccagtcgccttcccgttccgctatcggctgaatttgattgcgagtgagatatttatgccagccagccagacgcagacgcgccgagacagaacttaatgggcccgctaa |
| | cagcgcgatttgctggtgacccaatgcgaccagatgctccacgcccagtcgcgtaccgtcttcatgggagaaaataatactgttgatgggtgtctggtcagagacatcaagaaataacgcc |
| | ggaacattagtgcaggcagcttccacagcaatggcatcctggtcatccagcggatagttaatgatcagcccactgacgcgttgcgcgagaagattgtgcaccgccgctttacaggcttcga |
| | cgccgcttcgttctaccatcgacaccaccacgctggcacccagttgatcggcgcgagatttaatcgccgcgacaatttgcgacggcgcgtgcagggccagactggaggtggcaacgcca |
| | atcagcaacgactgtttgcccgccagttgttgtgccacgcggttgggaatgtaattcagctccgccatcgccgcttccactttttcccgcgttttcgcagaaacgtggctggcctggttcacca |
| | cgcgggaaacggtctgataagagacaccggcatactctgcgacatcgtataacgttactggtttcacattcaccaccctgaattgactctcttccgggcgctatcatgccataccgcgaaag |
| | gttttgcgccattcgatggtgtccgggatctcgacgctctcccttatgcgactcctgcattaggaaattaatacgactcactata (SEQ ID NO: 46) |

[0906] The sequences of the left end (LE) sequence element and right end (RE) sequence element on the pDonor_CP000117 are shown in the Table 7 below.

TABLE 7

| Elements | Sequences |
|---|---|
| LE | CCGGGATATTTACGTTTTGTAATCA |
| (pDonor_CP000117 | CGAATAGATTCTTGATTGCAAGATG |
| (962 . . . 1261) | AATTGCGATCGCATCTTTGTCGCAC |
| (300 bp)) | AGCAGAACTTTCTCAAATAATTTTG |
| | AACTTATGGAATTACTCAAAACCTT |
| | TATCAGTAATGGATTCAAACAATTG |
| | TTTAACCGTTTTATTTGAGATTTTT |
| | ACTAAAAATCAAGTTTACCATAGAG |
| | GTTAAGCTGAAATTGTTCAATCGTT |
| | TTATTTTATCGACAACGGCAGATTA |
| | AATATTCGAACTGTAATAATTGTTT |
| | AACCGAATTCTTTGTCTACAAATAT |
| | (SEQ ID NO: 47) |
| RE | TGTGGAGGAATAATTCGGTTCAACA |
| (pDonor_CP000117 | ATATATAATTCGGTTCAACAATTAA |
| (105 . . . 256) | TAAAACGATTGAACAATAACCTCTA |
| (152 bp)) | AAGGAGTACGATTGTACCAAGTAAA |
| | AGTGCGATCGCTTCCAGAGGTTATT |
| | TTTATGGTTAGGGGTAGAAGGGAAT |
| | GG (SEQ ID NO: 48) |

[0907] The pCas6875 plasmids that carried the Cas proteins and different NN-PAM were used to test the effects of different PAM sequences. Different primer pairs for Tn6677 LE/RE sequences were used for amplification as positive controls. FIG. 4 shows the test result with primer pairs a, b, c, and d in one set of experiment. FIG. 5 shows the test result with primer pairs a and c in another set of experiment. The gel bands of the amplicons (by primer pairs a and b) were recovered and determined (FIG. 6). In the experiments, a variety of 37-bp sequences were used as intended insertion sequences, which are shown in Table 8 below.

TABLE 8

| | | | | 37 bp spacer sequence |
|---|---|---|---|---|
| ID | Description | Encoded by | PAM | (5′→3′) |
| crRNA-1 | Targeting | pCascade_ | aa | tgtctcctgggaggattcat |
| | genome | CP000117 | | aaagcattgtttgttgg |
| | (glmS locus) | | | (SEQ ID NO: 49) |
| crRNA-2 | Targeting | pCascade_ | at | gtctcctgggaggattcata |
| | genome | CP000117 | | aagcattgtttgttggc |
| | (glmS locus) | | | (SEQ ID NO: 50) |
| crRNA-3 | Targeting | pCascade_ | ag | gattcataaagcattgtttg |
| | genome | CP000117 | | ttggctacgagaagcaa |
| | (glmS locus) | | | (SEQ ID NO: 51) |
| crRNA-4 | Targeting | pCascade_ | ac | gagaagcaaaataggacaaa |
| | genome | CP000117 | | caggtgacagttatatg |
| | (glmS locus) | | | (SEQ ID NO: 52) |
| crRNA-5 | Targeting | pCascade_ | ta | aagcattgtttgttggctac |
| | genome | CP000117 | | gagaagcaaaataggac |
| | (glmS locus) | | | (SEQ ID NO: 53) |
| crRNA-6 | Targeting | pCascade_ | tt | cataaagcattgtttgttgg |
| | genome | CP000117 | | ctacgagaagcaaaata |
| | (glmS locus) | | | (SEQ ID NO: 54) |
| crRNA-7 | Targeting | pCascade_ | tg | tctcctgggaggattcataa |
| | genome | CP000117 | | agcattgtttgttggct |
| | (glmS locus) | | | (SEQ ID NO: 55) |
| crRNA-8 | Targeting | pCascade_ | tc | tcctgggaggattcataaag |
| | genome | CP000117 | | cattgtttgttggctac |
| | (glmS locus) | | | (SEQ ID NO: 56) |
| crRNA-9 | Targeting | pCascade_ | ga | ggattcataaagcattgttt |
| | genome | CP000117 | | gttggctacgagaagca |
| | (glmS locus) | | | (SEQ ID NO: 57) |
| crRNA-10 | Targeting | pCascade_ | gt | ctcctgggaggattcataaa |
| | genome | CP000117 | | gcattgtttgttggcta |
| | (glmS locus) | | | (SEQ ID NO: 58) |
| crRNA-11 | Targeting | pCascade_ | gg | gaggattcataaagcattgt |
| | genome | CP000117 | | ttgttggctacgagaag |
| | (glmS locus) | | | (SEQ ID NO: 59) |
| crRNA-12 | Targeting | pCascade_ | gc | attgtttgttggctacgaga |
| | genome | CP000117 | | agcaaaataggacaaac |
| | (glmS locus) | | | (SEQ ID NO: 60) |
| crRNA-13 | Targeting | pCascade_ | ca | taaagcattgtttgttggct |
| | genome | CP000117 | | acgagaagcaaaatagg |
| | (glmS locus) | | | (SEQ ID NO: 61) |
| crRNA-14 | Targeting | pCascade_ | ct | cctgggaggattcataaagc |
| | genome | CP000117 | | attgtttgttggctacg |
| | (glmS locus) | | | (SEQ ID NO: 62) |
| crRNA-15 | Targeting | pCascade_ | cg | agaagcaaaataggacaaac |
| | genome | CP000117 | | aggtgacagttatatgt |
| | (glmS locus) | | | (SEQ ID NO: 63) |
| crRNA-16 | Targeting | pCascade_ | cc | tgggaggattcataaagcat |
| | genome | CP000117 | | tgtttgttggctacgag |
| | (glmS locus) | | | (SEQ ID NO: 64) |

[0908] The roles of the components of the CAST system were examined. Each of the components was deleted from the helper vector and insertion of the target sequences were examined (FIG. 7). The sequences of the amplicons were determined (FIG. 8).

### Example 2

[0909] FIG. 9 shows purification of the proteins in CP000117: TnsA, TnsB, TniQ1, and TniQ2. Affinity purification (Strep-Tag) and size exclusion chromatography were performed.

[0910] Whether the system (CAST/homing to glmS) can be reconstituted in vitro was tested. Ion exchange chromatography can be used, e.g., to get improved purity.

[0911] The system was tested for targeting 10 genomic loci of BL21DE3 (FIG. 10). The CP000117 CAST system locus harbors two TniQs for CAST and glmS homing (FIG. 11). FIG. 12 shows “N” AT-PAM tiling in glmS locus.

### Example 3—Biochemical Analysis of an Exemplary CAST 1-B System

[0912] Fresh affinity purified SUMO-tagged TnsA, TnsB, TnsC, TnsD2 (+SUMO-protease cleaved native full-length TnsA, TnsB, TnsC, TnsD2) were used. Both tagged and native conditions worked. The T24-CAST may be reconstituted in vitro if D2 is replaced with Cascade+D1. The in vitro Tn7 reaction occurred at 200 mM NaCl. FIG. 13 shows the in vitro homing of T24. TniQ was capable of glmS targeted homing without Cascade.

[0913] Tn7 transposon was also tested in 293FT cells. Applicants transfected both N-terminal and C-terminal tagged (tagged with HA, NLS, linker) human codon optimized TnsA, TnsB, TnsC, TnsD2 in addition to pDonor and pTarget (glmS locus), which were used for in vitro assay. The result was robust with 3 independent transfection. FIG. 14 shows the homing of T24 in 293T cells.

[0914] For CAST, Applicants co-transfect FLAG-tagged Cas8 OR TnsD1 with other HA-tagged components and perform pull-down to determine whether they form complex. In parallel, Applicants purify Di-Cascade for RNP transfection. Applicants insert the glmS locus vector into the genome of 293FT by phiC31 integrase to see whether Tn7 happens on the mammalian genome.

### Example 4—Characterization of CAST 1B Expressed in Eukaryote Cells

[0915] Applicants tested the conditions of temperatures, salt concentrations and buffer components for the activity and function of a CAST Type I-B system. In these experiments, CAST worked well at 30-37° C., at less than 200 mM of NaCl, and 15 mM of Mg₂, and 2 mM of ATP. The results are shown in FIG. 15.

[0916] Tags were fused to the N- and/or C-terminus of the CAST plasmids. Insertion of a donor polynucleotide by CAST was tested. The results are shown in FIG. 16.

[0917] The components of CAST were codon optimized for expressing in human cells. Expression of the components were tested in 293 cells. HA tag was used to detect expression. The results are shown in FIG. 17. The plasmids used in testing the expression in 293 cells are shown in FIG. 18.

[0918] Insertion of donor polynucleotides at target sequences by CAST in mammalian cells were tested (FIGS. 19-21). The insertions were characterized by next generation sequencing (FIG. 22).

### Example 5—Characterization of Functions of TniQ1 and TniQ2

[0919] Roles of TniQ1 and TniQ2 were tested. In these experiments, TniQ1 was needed for the insertion of the donor polynucleotide to target sites (guided by guide RNA) by CAST, while TniQ2 was needed for homing to a specific target site (FIG. 23). CAST and homing transposition competed for shared components (e.g., TniQ1 and TniQ2).

### Example 6—TnsB Target Immunity Interactions Suppress Transposition

[0920] Function of TnsB and CAST may be related to the ratio between the levels of TnsB and other components in the CAST system (FIG. 24).

### Example 7—Characterizing Type I-B CAST: PAM Screening

[0921] PAM motifs were screened for exemplary Type I-B CAST (FIG. 25).

### Example 8—Characterization of TnsB

[0922] Minimal TnsB binding sites were examined (FIG. 26). The TnsB consensus sites were investigated (FIG. 27). Various cargo sizes were tested (FIG. 28). Insertion site specificity analysis was performed (FIG. 29).

### Example 9—Characterization of an Exemplary CAST

[0923] FIG. 30 shows the results of plasmid targeting and LE junction of an exemplary CAST in mammalian cells.

### Example 10—Screening PAM Sequences in Mammalian Cells

[0924] Applicants performed PAM screening of exemplary CAST systems in 293FT cells. FIG. 31 shows the analysis of plasmids used in the screening and FIG. 32 shows the screening results.

### Example 11—Analysis of Functions of TnsD1 and TnsD2 in Mammalian Cells

[0925] Applicants tested the competitive and/or cooperative effects of TnsD1 and TnsD2 on homing and CAST functions. Insertion of target sequences were tested with the presence of TnsD1 and/or TnsD2. FIG. 33 shows the result of the analysis.

### Example 12—Examination of Plasmid Targeting in Mammalian Cells

[0926] Applicants examined the subcellular location where the plasmid targeting happened. Transfected plasmids were separated from nuclear and cytosol fractions. FIG. 34 shows the results, which suggest that the plasmid targeting happened in nucleus.

### Example 13

[0927] FIG. 35 shows exemplary Type I-B CAST systems.

### Example 14

[0928] T24 CAST locus is shown in FIG. 36. Constructs for adapting the T24 CAST system in mammalian cells are also shown in FIG. 36.

[0929] Expression levels of the components of the T24-CAST system in mammalian cells were tested. The components were transiently expressed in HEK293FT cells. The cells were lysed in RIPA buffer, and 30 μg protein was loaded on each lane for analysis. The results are shown in FIG. 37.

[0930] The components of T24-CAST system were tagged with NLS. Localization of the NLS-tagged components were examined (FIG. 38).

[0931] GFP was spiked-in transfected with lipofectamine3000 and the result was shown in FIG. 39.

[0932] FIG. 40 shows experiment schemes for analyzing Tn7/CAST plasmid targeting 293FT cells. The plasmid targeting of T24-Tn7 system in 293FT cells is shown in FIG. 41. The plasmid targeting of T24-CAST system in 293FT cells is shown in FIG. 42.

[0933] Roles of individual components in T24-CAST were tested by transfecting selected components in the 2^{nd} transfection and tested the effects. The results are shown in FIG. 43.

[0934] The ratios between proteins and guide molecule, and the ratios between donor and target were optimized (FIG. 44). In some cases, less protein expression was desired.

### Example 15

[0935] Additional Type I-B CAST systems are shown in FIG. 45. Additional Type I-B CAST systems are analyzed in E coli (FIG. 46). Larger pHelper construction may be performed. Human codon optimized proteins may be expressed in bacteria. The plasmid targeting profiles are analyzed in mammalian cells (FIG. 47). Different expression vectors may be used. Three Type I-B CAST systems were tested to show work in mammalian plasmid targeting (FIG. 48).

### Example 16—PAM Screening for T24 in 293FT Cells

[0936] PAM sequences for T24 were screened in 293FT cells (FIG. 49). FIG. 50 shows mammalian PAM screening pipelines for new orthologs. For 2 new orthologs (IB18 and IB28), PAM libraries were generated and plasmid targeting was tested in 293FT cells (FIG. 51). PAM screening results for 2 new orthologs (IB18 and IB28) are shown in FIG. 52.

### Example 17—Sequences of Exemplary Type I-B CAST IB18 and IB28

[0937] The map of IB18 locus is shown in FIG. 53. The sequence of IB18 locus is shown below.

```
IB18-CAST locus (40,895 bp); Accession:
100521|34|GCA_001597855.1_ASM159785v1_genomic|
LUHI01000035.1|201628|Anabaena
(SEQ ID NO: 65)
        1 ggttttgaat tcaagtaacg cttcatatat gtttacaaat cggctaaatc tctgattggg
      61 tgatgaggag aaatacgagg cggaaatgtg gctattttat aggaacagag agagattgcc
    121 gaaaagtgaa ttttgagaag tgcctattaa attgtttaaa gttatgtagc cttttactta
    181 cgccgtataa gccactgcgg taaactatgc gttgattatg attctttcac agataaagaa
    241 cactggaaag gagccgtttt ttcaatgtct cataccgtaa aaatctacga tacctgcatt
    301 ggctgcaccc aatgtgtccg cgcttgcccg actgacgttc tggagatggt tccttgggat
    361 ggctgcaaag ctgctcaagt tgcttcttcc ccccgtacag aagactgtgt aggctgcaaa
    421 cgttgtgaaa ctgcttgccc caccgacttt ttgagcatcc gggtttacct gggcgcagaa
    481 acgactcgca gtatgggtct agcttactaa ggaattaact gctaattcct gatttagttg
    541 accattcagt gcctcgatag caaacaactt tagcattgta gggtgggcgg cgatcgctca
    601 tcctacaatg tcaaactgga aaaatatgaa tatacttctt gacacagggg ctaacagctc
    661 ctttttttgt ggaactcgat atttagatca gcatctatac ttgatgtaat tatcctgaac
    721 aggtggtgtg agtaatgtgt ggcatcgttg ggtatatagg cactcaaaca gcgacagaaa
    781 ttttattagc agggttagaa aaactagagt atcggggata tgactccgcc ggaattgcca
    841 cggtttggga aggagaggtt aattgtgtcc gcgctaaagg gaaactctac aatcttcgtt
    901 ctaagctgga acagtcagca acaccagccc aaataggcat cggacacaca cgctgggcaa
    961 ctcatggtaa accagaggaa cataacgccc atccgcattt agacacagct atgcgggttg
  1021 ctgttgttca aaatggaatt attgaaaact accgcgagtt acgcgaggaa ctgaaacaga
  1081 aggggcatca gttccgttcg caaaccgata cagaagtgat tccccatcta attgcagaat
  1141 atttacagca tcttccctca ccttctcacc ccctcacccc ctctgacttt ttagaggcag
  1201 tgcgccaagc tgccaatcat ttagaagggg catttgcgat cgccgtcatt tcggctgact
  1261 accccgacga gttggttgtg gtgcgtcagc aagccccctt agtgatagga tttggtcaag
  1321 gtgagttttt ctgtgcttct gataccccgg caattgtcgc ctatacccgc gccgtactcc
  1381 ccctagagaa tggcgaaata gcccgcctca cacctttggg agtggaaatt tacaactttg
  1441 ctggcgacag gttgaaaaga caaccccgaa tgctcaactt gaatcccacg atggtagaaa
  1501 agcagggatt caaacacttc atgctcaaag aaatttatga gcaaccggga gtagtcagag
  1561 ctagtttaga agcatatttt gatcatgata ccgttaacct agacttacca caggattttt
  1621 acgcagattt agagcaaatt cacatcgtcg cctgtggtac aagttggcac gctgccttag
  1681 tgggtaaaca cttactcgaa caactagcgg gaatttctac ccaggtacat tacgcttctg
  1741 agtatcgcta tgccccatca cccctgacag ccaatacctt aattattggt gtcactcagt
  1801 caggggaaac ggctgatacc ctagcggcgt tagcaatgga aaaagaacgc cgccaaggaa
  1861 aagaagcgaa atatcaggcg cgacttttgg ggattaccaa ccgcccagaa agtagcctcg
  1921 gtttgatggt tccccatatt attaataccc tagccggaat tgagattggg gtagcggcga
  1981 caaaaacctt tattgcccag ttgatggcgt tttatgcctt agcattggat ttagcggctc
  2041 gtcgccagac actaccaccg gaaaaactca cagaaattat tcaaggcttg cgccagattc
  2101 ccaaggaaat tgaggcgaca ttagaacgtc aggaagaaat caccgaacac ttagcccatg
  2161 aatttgcgga aaccaaagat tttatctttt tgggtagagg gattaacttc ccgatagcat
  2221 tagaaggggc gttgaaatta aaagaaatca gttatattca cgctgaaggt tatccggctg
  2281 gggaaatgaa acacggcccg atagctttgt tagatgctaa agttccggta gtagcgatcg
  2341 cagttcctgg tactgtgtat gaaaaggtga tttctaacgc tcaagaagcc aaagccagag
  2401 attcccggtt aattggggtg actcctgtga cagatggcga agccgcagaa atctttaacg
  2461 atttactccc agtgtcatca gtggatgaat tattatctcc catcctgaca gtcgtacctt
  2521 tgcaactttt ggcttatcat attgcagcaa gaaggggttt agacgttgac cagcctcgga
  2581 atttggcgaa gtcggtaact gtggagtaaa ataatacttt aaataagtat aattgtacaa
  2641 caataaaaaa gtcgtataac aaataaaaaa gttgtacaat atataaaaaa gttgtacaat
  2701 atatcctgtg ggtgcatatg caagcatcta caggagtttt tatggctaga agtaagcaag
  2761 attggacgca agccaagttt gagcgttact gtaaggaagg tcgtggtcag ggcagtggga
  2821 aaaactatca gccctggatc aagattcagg actttccctc caagggtcgt gtttccagac
  2881 caccaggttg gaaaacaaac cgagaacatc atctcttttc tgataacgag aagcgactgt
  2941 tttacgtatt tgagtggtca gatgcgatcg ttgatattag agagcagttt cctctacttg
  3001 atctggactt agcaattaat attgcggatg aaatgggtat taactatccc aaagatccgc
  3061 aaagcaatac gccatatgtt ttagccacgg attttatgct ttctgtccag caaggtaaga
  3121 atatagttca gaaagcacga acatttaaac taaccaagga tttgggaagt aagtcggtag
  3181 ctgaaaaatt tgagttagaa aaacgttact ttgctgccaa aggtattgat tggggaataa
  3241 tcacagaaaa agaagtccct aaacaattag ctgagaatgt tgaatggatt catactgctt
  3301 ataaattaga agaaaatgca gatataaatc ttgaagaatt acgtaacatc gcaaatattt
  3361 taaagtttag acttcaggaa agtgatgcaa gtatcaataa aataacaacg gttttagata
  3421 aggagatgaa catagagtct ggcacatctc tctatctttt tagacacctt attgctcgga
  3481 aagaaatcat tatggatatg ctggtaaata aaatatctag ttgtccatct tctaaagaaa
  3541 ttcaaaaaat aattttttaa gctaggacga ggtactttat atgattaatg atttgtttgt
  3601 aaatgacctg attgaatgga ttgatgaatc cggtaataac tttatagaac gagttctctg
  3661 gattgatgaa ggatatatta ttgcctttgt ttatgatata aatgctaaaa caggatttcc
  3721 agaggctaaa aaagtttcag agattagaga agctatttct gatggtcgtg cattgaagct
  3781 taaatcagac ccgtgggcaa gaatcgtaag agatgaagat ttgtcagaga aagaaaaaga
  3841 acttagagat agggcttggc aaataatttc atttatcgtt actcaagaac cctcaatata
  3901 ctatcgggat tatagaggta ctttagttca gcaggttatt gaaaaatata atgcaggtag
  3961 aactgaaggt gaattagtac caataactgt ttataaatat ttaagaagat tttggcagag
  4021 gggtaaaaac aagaatgctc tcttgcctga ttatgcaaat tctggtggta aaggaaagcc
  4081 taaatcttct ggagacaaga agagaggaag acctagaaaa tacgcacaag ttccagaaat
  4141 tggtgttgga agaaatgtta cagaagaaga taaaagaata tttagatttg caactgctaa
  4201 attctataat aattccaaag aaaatttctt aacgactgct tatgatttaa tgattaaaga
  4261 atattacgct gaagattttt attacgatga taatggagtt aagaaaagta ttttaattcc
  4321 tccagataaa cgacctacat ttacccaatt taaatactgg tacgaagtag aacaaactga
  4381 tatcagaaaa actatgatat ctcgtaaggg ttcgagaaaa tatgccttag aaaatcgagc
  4441 cattaccgga acttcccaaa tggaaactat tgggccaggg tctagatatc aaattgatgc
  4501 tacgattgca gatgtatact tagtatccct ttacaaccgc aactggatta ttggtagacc
  4561 tgttatatat gtggtgattg atgtttttag tcgcatgata acaggggttt acattggatt
  4621 ggaagggcca tcttggacag gagcaatgat ggctttagcc aatgcagcta cggagaaggt
  4681 caagttttgt cgggagtatg gtattgagat ttctgaagat gagtggccat gcaagcatat
  4741 tcctgatacc attttaggcg acagaggtga attagcaggg atgacagtag aaacattaat
  4801 ccctaattta aatgttcgta ttgaaaatac tgctccttat cgagcagatt ggaaaggatt
  4861 agtggaaaga caatttcgca ttattcatgg gtatgtcaaa ccatttgttc ctggttatat
  4921 agatactgac tttagacaga gaggaggaca tgattatcgc cttgatggta ggcttaacat
  4981 agatgaattt actaaaatag ttatattttt gattctccag cataacaatc atgattatct
  5041 aattgattat gctagagatg aaatgatgat taccgatgat gttaatccta tacctagaga
  5101 attatggcaa tggggaattg ccaatcgttc tggtagactg agaacttttc cagaagatat
  5161 tgtcaagcta aatttaatgc ccacagaaaa agcaacaatt actgctcgtg gtatcaaatt
  5221 taaaggaatg tactacactt gcgagaaagc aaggaaggaa ttttggtttg aaaaatctag
  5281 aagtagttta ttatctaagt cagagaaatc attgaatata tcatatgata ttcgacagcc
  5341 aaactttatt tatttacgtt ccccaaacgg tagagaattt gaaaaaggtt ggcttttaga
  5401 atcgcaacaa agatatttag ataaaaactt ttatgacatt gattatttat tagcatatga
  5461 aaaattgcaa aatcaaaaac atcaaggtac tcggttacag gcaaaagctg atctgatagc
  5521 caatatagaa agtattgtta gtcaggctaa agaagagact gaggcagttt tagatgatac
  5581 tataagtaat agacaaaaag ttagtggcat tcgacagaat agagcagacg aaaaaaatgc
  5641 tcgacgtaaa aatgaagcat ttgaactagc aaaagcagaa actcccaata ctgataatac
  5701 taagaatcta ataaacactc aatctgaaga ttccgaggat tcaaaactat tacagcctga
  5761 ccatatggat ttactcaaac ggaaaagaca ggagcgaaaa cgtggaaagt aatgaggaag
  5821 aagttgttag tattcctaat ggaaagtcag cagttattgc cagatacata gaccaaaaac
  5881 ttccagaata taacgctaat ccattgattc aggcactacc tcctatcctc tcagcagaag
  5941 aatttatcga taaagtaacg agaacaccag attttgatga acaagagagg gagctagaag
  6001 cgcactacag gtttcattgc attgagaggc tatctagata ttttgatcct caaaataaaa
  6061 ctgttgaact acagaaggtc atttgtgcgc taattatgac gggctattta gctcggaata
  6121 ttctgaaacc tgaatatgca agtcgctcta ggcaaattta taatgcaatt aaagatggag
  6181 gagggaaaaa cttagaaaac tatgttaatc ttcctacatc tgcttccggc ctaaccctaa
  6241 ttggcccatc agggatggga aagtctacga atttccaaaa tattcttaat ctttatactc
  6301 aagtaattct tcatcctgag tatagtgttt accaaatagt ttggttgaag gttgactgcc
  6361 ctcatgctgg ttctttaaag ggtctgtgta cggatatttt tcttgctgtt gacaggctat
  6421 taggtactaa ctactttaaa aagtttggtt cctcacgcaa ctctgaagat tatatgctgg
  6481 ctcaagttgc ccaaattgcc catactcatc atttaggggt tttagttata gatgagatgc
  6541 agaatctggt tacagcaaga agacgtagct cagatatgtt gaatttttta gtaaaaatgg
  6601 acaatactgt aggaattcca gtaattcgag taggtactaa tgaggctttt cctattcttc
  6661 aaggaaattt tagaaatgcc aggagaggga caggagaagg cagtgtaatt tgggacagaa
  6721 tggtaaatga tgatgaatgg tatttcttca tggaaggaat gtgggaatac cagtggacaa
  6781 aaactcctgt tcctttctcg gatgaaataa acgaggtttt ttatgacgaa agccagggaa
  6841 ttattgatat tgctgtcaaa ctttacaaaa tggttcaatg gagagcgatt tcaataggtg
  6901 gtaaagaaat tattactatt gagttaattc gtcaagctgc taaagacgga ctatatttag
  6961 tcaagccaat gcttgatgca attaggtcag gggacaagga gtggatgatt aagtataaag
  7021 atattgcgcc cctagatact acagaatatc aaaataaatg tctatctgag cttgattcca
  7081 aggatttgaa agaaattcgc agattggcaa gaaagcaaca gaatcagcag aaagtatcgc
  7141 cgaagctaaa ttatgtaatt cttgagcttt tgaacttgga agtagaacct gctaaagcaa
  7201 aggaatgtgc agaacaagta attgtttcta gtgatgaaga tgccgaaatt ccatctttag
  7261 tcaaaaaggc atatgctctt gctttgcaag gagggcaagt aaatgagagc ctgactaaga
  7321 caaatactaa gaaagctaag ttaaagccca attatcaaga aaatgatatt cgacgaattg
  7381 ttgaaaatgc caataaggag aaaaaatctg catacgagga tttgaaattg gcaggcataa
  7441 tcaaaaatcc agttgaagat tttataaata tttagcttct caatgcttag tttcttccca
  7501 actctgtatc ccgatgaact gttatatagc actttagcta gataccacat tcggagtgga
  7561 aataaaagtt tcaagcaaac tgacttagag ctattcggtt acagttctca acaagtatgc
  7621 aaaattactt taactaataa tttaaattat ttagtgaaaa acttaccttt acgctcccag
  7681 caaaaagttg agaatttgct acaaaatcat acgttatatc ccttttacgc aactttttta
  7741 atgccacagg aggcttggtt actaaaaaac tcaattagta aaaaactcag tggctccata
  7801 ctagatgttg ctaaggtggc tactaattct attggtgatt caaaaaaatt tttaaaattt
  7861 tgtcctgaat gtttagaaaa agatacccaa aaatatggcg aaccttactg gcatagaata
  7921 catcaagtac ctggcatttt agtttgtcca actcatggta tcgttttaca ggatagttgt
  7981 gtaaaagttg aatcgaaagg cgtacattat catgctgcga gcgtagataa ttgtttagta
  8041 gcctgcaagg tcaaaaattt gacaaataac acagtaaaaa cactcttcac actggtgaat
  8101 gatattaatt ggctaattca tagcaatttt gcctttcaag gtttggcttg gcttcgcgct
  8161 cagtaccagc gttacttagt ggataaaggt ctgctacaaa cctttcctgg tggcaagttt
  8221 aagtttgatg agtatggttt tgcccagctt atatttgagt tttatggtca agaatcctta
  8281 gaagccatca atcccaagtt gactcaacat caaggtaaat acttttctca ctgcttgttt
  8341 ggatgcgact taagcccagc aattgaccgg ataactcata tcttattgat aaaattttta
  8401 gcaaattcta tagaagagtt ttttcagtaa taatctgcat ataaaaactg ttaaatacat
  8461 taatataaag taataaataa ttaagaaaat tatctttata ggttggtatt tcaagtattc
  8521 tcagattcgt gagtaaggta aagtaagtaa tatcatattt atttcacacc acgttgcatc
  8581 tactgaaatt tggcatctaa aaatgattgt tgatggcaac ttacttaggc agattccctc
  8641 agaatcacca ccaaagccaa gagagctttt aatgtctcag ttaccatata tggatttaac
  8701 ttttaacctt attggtgaga cattaccttt cgaccacggc tatgagctat tttctgcgat
  8761 cgcccacttt gaacccaaac ttcatacatt agacacgctg ggaattcaca ccattgcagg
  8821 tattcccaag gatggtgtaa ttaatctgac ccaaaattct aggcttcgtg ttcggatacc
  8881 agtaaatcag gtacatttag tttacccatt ggcgggtaag tccttgagaa ttggtaagca
  8941 tacaattcgt ttgggtattc ccgacatatg tttgcttcaa cctgccgagc aattgcgatc
  9001 gcgcattgtg gtaataagag gtcatgaaga acctgaaact tttttagtcg tagcgcagcg
  9061 tcagctagaa cagctgggta tccaagcaac cgctagcatt cccaccaaag ccaatggcaa
  9121 accaatacgt aaaactatca aaattaagcg atttacagtc gtgggttttg gattagaagt
  9181 tacaaattta agcaatgaag actcactgac gttgcaaata catggtgtag gaggaaagca
  9241 aaagatgggt tgtggactct tcatgcccat tcaagaaagg caatagcaat tactcgaaag
  9301 cagataatga agacagcagc taaccccaaa attcagctta atctcggcga tcctagtatg
  9361 accttattgc atcgtgctgg ggtggcagga ctttggatga cgctcaaaaa actggaaaaa
  9421 atctatccaa ctgctgctca acgtattggt aattttactt ggttgctaac ccctagtaat
  9481 atcagtcttt attgggaagg acaggatttc acagttttag actggttgct gaagcattca
  9541 tttcagatca gtgatgaggg tttaatttcc ctaacagggt tagattctca aaacatggat
  9601 attcaaacgc aaataattat ccaccaaggt atcacagcaa cttttataca acataataaa
  9661 ttttttaagt ctgcgggtca acaatctaag caactaatta ttgatggtat tcaactcagg
  9721 gttgattata agaaagctgc ttcctatgct catcaacatt ttgctaaaca tttatgtgac
  9781 cagtacggac aattgctaca agagccaatt ggtataaggg ggtggcttta tccaggagca
  9841 gtagttcgcc attatgcttt taaagaacaa accgcatttg aagaaaaagc agaatatgct
  9901 ctagcgttgt tgttcgctcc tgtggcttgt caatattttg tgctgcgatc gcacaccgaa
  9961 ccatcacata caaactatgt tctggttgtt cctgaagtaa ttgatttaga actttatgcc
10021 cagtatttgt ggtatttgag taaattagat tataaacatt ttcacgtatc tagcttagga
10081 gatgctggat taaaatttat tacttatgaa gcaaaacaac tagataattt caattttatc
10141 aaacgatgtc aagtaatctc ctttagtaca aaagcttggt cagagcggca aaaaactcgt
10201 gcagaaatag caatcataga attaaattct tcagttagtt atctctataa acttagttgt
10261 atttgttttc ctaattgcca agttgttata tataaaaatc aacatttttt gcttccaagt
10321 ttaatgaaag gaataattgc caataatcta gcaatgggtt ggccttggtg ggctaattgg
10381 atctcagtta ttaaaaataa taaatcattt aaacaattta ctgatgagta tataggaatt
10441 aataaaatga ttcaggactc agaatgggac atagaagctc aaaaattatt tattcaagct
10501 tgtcatgaag cattaaggaa aatatacgcc aagatttata gcagaatgaa agaaggtgga
10561 tatgctcaaa tagaacgaga aaatacacgc attttatctc agctaaaacg ctgcaccaat
10621 gctgacaatt tcagaaaatt tattgcagag ttttggggga gggcagggca aatgacaatt
10681 ctggaggaac attgggtgga attactacca ttgactacag ggataggcaa ttggaaagta
10741 gccagggact taacttttat tgcaatggct agctatccaa agaataaaat aacagaggta
10801 taggtaaaat catcacaact atttgagcta aatcgtgagt aaacgttaga ttttttgatt
10861 tgattaagca caaaatatta attgtttagg taattgttga atgtttcatc tgttcggtaa
10921 cattttgact acttatggaa ccgccgctaa taatcgtggt gaaaatgaag gtaacacaac
10981 tactttacaa aaattaattt ggaaaggtga agttcactct accgtttcat ctgaggcaat
11041 tcgttgggca ttgcgatatc attggcaaaa tgctggctat cctgtgaata gacgttggga
11101 tgagaatgct caaccagtag cggatcacat ctgggaagat cctaattttg atgatattcg
11161 cttcattgat gatgatgtgt tgggatttat gcaagcggaa gcggcaaaag ttgaagcagc
11221 agatgaatcc gaagttgaaa tccagaactc aactcaagat gagaaccaaa caacctctca
11281 aggtgaggag aaaaaaacct cacaacgtaa gcgcaagcaa agacctaaag ggagaataag
11341 tgctagacga ggtgtattag aagtcactcg tgcagtatca acaattcctt atgctggtga
11401 tattactttc aattctatga gtggaaagaa aggacgaaca tctctttatg ctacagaagt
11461 tcacgctact cggtatcaat atggctttgc attaacaccc aatagactca aagataaatc
11521 tcgcattcat gctgtcttag atggcttaat ttcgattgga gacgtggcag gaaatcacgc
11581 tcgtttcttt tatgattttt ctcccgatag cataatatta cggtggacac atgatttctc
11641 acctcgctta ctttactgct ttgaagaaga tgaacttaga aatatatcaa cacccgattt
11701 agtgcgacgg gtagaagctg gagatataga ccctaaagaa ttatggatag gaggggcaat
11761 tgctagcact ctagaaaatt taggggccaa tctttttccc ggagtgaagg caacagttga
11821 agcattaaaa caggtgatta ttgaagattt gcagttgtcg ttaaggagtt catgatatga
11881 cgacaattgt tgtaaaagta gaagttccca tagcttgttt tcgccagtct catgctaggg
11941 aatacgctga aacctaccct gtaccaccgc catcgacagt atatggaatg ttactatctc
12001 tggttggaga agttgataga tacaaacact gcggcgttaa gctggcgatc gcacttctat
12061 ctaaaccaga aaagtcaact gttattcgta cctgccaccg atttaaaacg aagaatatcc
12121 atgaatctaa aaataataaa cctgattacc aggatttact aactaatatt gagtttgtag
12181 tttgggtaga tgctggggca gataaagcca aaccaaattt agcgcaacgt ttagaagagg
12241 catttactaa cccagcttct attaataggt ttggtggatt atgtttaggt gaaagtcggg
12301 atttagtgaa tgatgttagc ctgttacctg aaaattacta tgcagaatca atgcgatggt
12361 taattcgaga tgattatggg ttactaacct taccttattg ggtagatcat gtaggttcac
12421 ggggaacgcg atggctgtgt tacgaaattc aggaatttca agtatttcaa ccacccgaat
12481 tatcttggac ttcaattcaa agtgattaga gggcattatt tacttttgca agcatctttg
12541 cttgggcaat ttaaatacca caataaataa tcttgtcttc ttgtttcaca agcattttag
12601 ggatttcata tactttcaat gtgcttgcaa tttcctggaa caccttcaaa acaagggtta
12661 gagctttagc aactttgctt ttgctatgaa tagctattaa tttttgcaac ttgactaatc
12721 ctaattggaa ggtgcttgta aaattagtac agagctttgg ctagtcaaca ggtttgatga
12781 tcgccgtgct ttaacattag atgtcgttag gcgttgagca gtgattaacc tgaaggcttg
12841 ctccgggatg ttgtaggtgc tttaacatta gatgtcgtta ggcgttgagc agcaccggta
12901 ccgcgagtag tcgcaccaat attcatatgt gctttaacat tagatgtcgt taggcgttga
12961 gcagttgaat gcgaagttat cggcagatgt tttgttgttg tgctttaaca ttagatgtcg
13021 ttagacgttg agcagtgacc attggtgtat ccatcaatcc tgactgctgc gtgctttaac
13081 attagatgtc gttaggcgtt atctactttt gatacaaata cttttgaaat acatacaaaa
13141 ctagctctgc caaatatctc cttttcaaga catttttgcg attatttttt cccactgctc
13201 aatctggttc tgtagttgta attgccgatc gcccaaatct tgactatcat caacagacaa
13261 atcctgaccg ctcaatcgct cacgatagag agcaatcagt tcggttaggg cttttttatt
13321 gcttgctgat cctcctgggt cagagaacta acattgactg gaatcaactt tctgccaatt
13381 ctctctacaa actcagaccg acttaaatcc atactgtcgg cgatcgcatc taatccatca
13441 atcccggtag gagttagggc taggttaact cgtttcttca cctcatcgta cagttctggt
13501 acgtcttttt gacctttttg ccctttctta cccattgccg tctagttttt gctttcctcc
13561 caatcatagt aaacacattt agcacttaag ttaaacatta aaattttttc caatacttta
13621 ggtattgtgt aatccctaat ttagttagat aatacaggca ttgtgtaatg cctaagcagg
13681 catctcgtaa ggatatgagt aactaattgc accgtttgat tcctcaacat ctcaacggct
13741 taattttcat gggcaagcat taattgcttc gtggccaatt cagattaatc aaaatctgcc
13801 agatgattta ggcatttttc aaaactatat ggttagtttc ttccctaaac cttatccaga
13861 tgaaatttta tatagcgtca ttgctcgtta tcacattaga agtggcaata cgagtcccaa
13921 aattacactt caagagttat tcaattcaca aactactgtc gcaacagtag atttaccatc
13981 gaacctgaat aatttaattc aaaacctaca atttatctca aattaccaag ttgaagattt
14041 gatatataaa catactctct atcctttata tagccctttt ttacctgcaa acaggtctag
14101 tcaggtactg gaatctatga aaggagatta tgggggagat attcatacaa gagccggaat
14161 tatggcaagc tcaattacta tgccaaaata ttttcggttt tgtccaactt gctgggaaga
14221 agacttaaaa aattatggcg aaccttactg gcatcgcatc catcaaatac caggggtttt
14281 agtttgtcca tttcatgatg aagttttgca agatagccta gctcctttac acggttttaa
14341 taagcatgaa tattatgcag ctagtacaga caaatgttct attactaaag aaccaagtat
14401 ttttagccct gacacgttga aaaaattact ggtattagct aaagattttt ggtggttact
14461 caatagtgaa ataccttgcc aagaaccaca gtggtttcgc aaacagtaca ccaatctgat
14521 gattgagcag ggtcttgcaa ctgcaactgg acgaatttac cagaaaaaac tactagataa
14581 ttttttgttt ttttatggtc gagaaatgct cagtgccgtt aattcaatag tcactcataa
14641 tgattcaagc aactgggtta ctagcattgt caggaaacat aggaaatctt tccatcctct
14701 tagacatctg ctgatgatgc gttttttgaa aacatcagta gaggaatttt tcaagcaaga
14761 taataaatac aagccttttg gtgaaccccc gtggttgtgt ctcaatgctg ccgcagagca
14821 ttacctacaa ccagtcatta ccaatttagt cattacttta tgctgcgata caaaaaagcc
14881 tgttggtact ttttcttgta cttgtggaat ggtttattgc cggactgggc ctgatgaaac
14941 ggatgatgac aaacttcgca ttggtaaagt aaaggcattc ggtcaactat gggaacaaaa
15001 gctgaaagaa tttgttgaag ttgaaaagtt gggtttgcgg gagacagcta gaagattaaa
15061 tgttgatccc ggaactatca aacgctatgt atctctgcta aaactgacca cttattggca
15121 gactagaaag gaaaatggct ctgtagactt acaggaagta gcagaaatac accccaattc
15181 tgcaactgaa ctcaaattga aacacaggca agattggatg gctttacaag cacagaatcc
15241 tgacgcttca aagacaactc tgagaaaact agcaccagcc acctatattt ggctatacag
15301 aaatgataga gaatggctca atcaaaactc acctgcatta caagttgctg ttccttccgt
15361 tgtgagagtt gattggcagg aacgagatcg gcaaattctc gcccaggctc aagacgcagt
15421 gcgatcgcta attaacgccg atacgccaga aagaatttct attagtaggg taggaaaaac
15481 tatcggctta ctcgccttac tcgaaaaaca cctcgaccaa atgcctttaa caaaggctta
15541 cttagaatca gtagttgaaa ctgtagaaga ttttcagatg cgccggatca agtgggcaat
15601 caagttgctt gatgaatgtg gagaagaaat tatgcgctgg aaggtagtca gagttgctgc
15661 tttgcgggag gattgctctg aaagagtcaa cgcatttctg gaaaatgaac ttgacaaagc
15721 gtacaagaaa gagaggtgat tccattcacc tctccaagtg atgagataaa tgctttgtgt
15781 gttatgctgc gtcggctacc agtaagccat tcacagcgac gatgatgatt tgcgctgcca
15841 aaggagtgtc acaacgtagc ttatcgtcac tattacaggg ttgtgctatc cattgaccct
15901 ccagattttg gtagaaagtg ccgagaagtt gggaaccatt ccaaacacgg taaagttcac
15961 caaatacctc tgataccgaa tcaatctcaa tttccggtgc tatttcctca cctagctgct
16021 caatgtactc ctcaaactct aattgagcca aggcttggtt atcaaattca tcctgtacaa
16081 tcatcatgag tcacctcgtt aacggggttg aacaaaaggc gatggcgtaa aacgcccgcc
16141 taaaaggcga tcgcatttct cttgccggag ggcgatcgcc tttttgattt cagattttat
16201 tttagctact atagtggcta tatacaatat atgtatggaa aactttattc agtcacttcc
16261 actgtgctaa gaaaatcctt taaagaaatg cctaaagcca agcaaatagc ctctaacacc
16321 ttgatagaga cactttcaga ctcgccgtac tctagttttt tcaggttttg gtgagagcat
16381 tccccaccct tagcagaaat ttcctctgcc aatttctgcc gggatttttt accacgcata
16441 cgctttaaaa ctgctgctct atctttattc cagctaacgg ccacaacgtc tgaaacataa
16501 atatacattt tagtttctct attcctctca ttgttcatat aatagctaca gcagtaaaca
16561 aaagttatta atttcggcta ctacagttta caaattatgg gttagaggta agcgatcgca
16621 gttaatcaag ttttcctgtc agtcaaaaga gagtaactgt ttttgctatg aataccactt
16681 gtgcatataa tttcaaaggt tctcccagaa caaatacatt agccatctac agcatctaga
16741 gccttgacac ccgaagaact aaaacagctt gaagacaccc tatggcagag tgcagatacc
16801 ctgcgggcta actctgacct cacatcgaat gaatattcga cccctgtaat gggtttaata
16861 tttctcaagt ttgctgataa taaatatcgt cagtatgaag cggagatttt acaggcttat
16921 gaagcattaa aagggactcg tagagagaag aatatagaag aaatagctat tgagaaatgt
16981 ggtttttatt taccaaatca cgcgcgttat gactatttat taaacttacc agaagaggaa
17041 gatatagcta aaaaaattaa agaggcgatg gagtccatag aaaattataa gccagaactc
17101 aaagacacat tgcctaaaga tgaatatttc cgcctcactc gtacagacaa aggtattcct
17161 aaacaactat taaaaaattt ttctaatatt cctcaaaacg ccactgggga tatatttgga
17221 cgaatttatg agtatttttt aggtaatttt gcactttcag aaggacaagg tggaggtgag
17281 ttttttacac cccgttctgt ggtgcggcta atggtagaaa ttattgaacc attaaaaggt
17341 agagtatttg atcctgcttg tggttctggg ggaatgtttg tacagacagg acaatttatt
17401 caagaacagc aagaaaatca aaatcagggt gtaattaatg atttatatgt ttgtgggcaa
17461 gaaaagagac tggaaactgt aaaactagca aaaatgaaca ttacagttaa tgggttaagg
17521 ggagaaatca aacaagcaaa tacgtattat gaagacttgt ttaatagtct tggcgatttt
17581 gattatgttc tggctaaccc accctttaat gtggatgatg taaatctgac acaggtggag
17641 aaagacccgc gatttaatac ctatggtatc ccccgcaata aaacaaaagt taaaaagcag
17701 gatgagggta aacaaacagt acctaatgct aattatctgt ggattaattt gtttgctaca
17761 tccctaaaac ctaaagctag agcagcgtta gtaatggcta actcggcttc tgatgcgcgt
17821 cacgcggaag cagatattcg ccaaaagctg attgaagaga atttaattta tgggatgctt
17881 gctctgccct caaatatgtt ttacacggtg acgctacctg cgacattgtg gttttttgat
17941 aagggcaaga ccgatgataa gattttgttt attgatgccc gaaatatttt tacccaggtt
18001 gacaggtcac atcgagaatt ttcagcagaa caaatcagta atctggcggt tattagttat
18061 ttgcgtcagg gtaagcgaca tcggtttatt aagttgatta atcgctattt tcagcaagga
18121 atggcgaagt taaaagaaaa tcaatcacag gtaaagcctg tttctcagca attaatggct
18181 gtgttgaatg atggtgcaga tgatgtcaaa gctagggaag ttgctgttaa tttcctcaat
18241 ttgtgggatg aggtaacaga tttagaaatt cagtatcaag gttatttaga taaatataat
18301 tatcctggaa taaatattga tacccaaaat gaggcacagc aaaaactaag tgccgcattt
18361 aaaccgtttt ttgataattt ccatgttgag ctaaaacagc ttgataagac tgtgcgcgct
18421 cgtgaagcag agctaaagga gaaagcaaag gaagcagagg cgaagaaacg ggggcagatt
18481 gataaacaaa ttaaggaact gaaaagcact ttggaaacgc tgcatgagga ggtaaaatca
18541 gcagaattat tttttactca tattcgctgg ttacaggaac gttttcctaa tgcaaaatat
18601 gaggatgtga cagggttgtg taagttggca actttggagg aagtgaaaga acaggattat
18661 tcgttaaatc ctgggcggta tgtgggggta gtgattgagg aagatgggaa aacggaagag
18721 gagtttattg aggagatttt aggtttaaat gaagagttgg aaaaattaaa tcaagatgtg
18781 catttgttag aggggattat tgctcataat ttacgtgaga tagcggggga tttatgagtg
18841 attatttaaa tcaatttcag aaattagatg aagtggggac tattgcaaga ggtaaatcaa
18901 aacatcgccc aagaaatgag ccatcgttat atggtggaaa atatccattt attcaaactg
18961 gagatgtaaa acatagcaat ctttacataa ctgagtattc ccaaacatat aatgaaaaag
19021 ggctatctca aagtaaatta tggcaagcag gtacattatg tataacaatt gcagctaata
19081 tagctgatac tgcgatatta aaatttcctg cgtgctttcc tgatagtatt atcggattta
19141 taccctacaa aaataaagct gatgttcgat ttatcaaata ttgtttagat acatataaaa
19201 ttcaaattca ggcaatttct caaggcacaa cacaagacaa tttgagcgta gaaaaacttt
19261 tatcgcttaa atttagaatt ccattaattt ccattcagaa aaagattggg gcgatacttt
19321 cagcttatga tgatttgatt gaaaaaaata atcgccgtat tgccatatta gaaaaaatgg
19381 ctgaggaaat ctaccgtgag tggtttgtcc gtctgcgctt tccgggacat gaacaggtta
19441 agtttaataa aggcatcccg gaggggtggg agagaaaaag attcgatgaa ttttgtctac
19501 tccagcgtgg gtatgatcta ccagatgcta aagtaattcc tggccaatat cctgttatcg
19561 cttcaacttc aattaaaacg taccataatc aatttaaagt taaccctcca gtaattacaa
19621 ctggtcgctc aggctctctt ggcacagttt tattcatcaa tagtcaagcc tggcctttaa
19681 acacgacatt atttttaaaa aacttttatg gtaattcacc atacttaatt tactacacac
19741 taaaattctt aaaactggaa aattttaatt ctggtgctgg tgtacccaca ctaaacagaa
19801 atcatttggg tggattgtat atgtctgttc ctcctaaaaa cttgcaaaat aattttactg
19861 acaaaatagc aattattttt aaacagaaag agcttttagt taggttaaat aataaacttg
19921 ttgaaacacg cgatcgcctt ctcccccgcc tcatctcagg taaactttcc gtcgaaaact
19981 tagacatcca attcccaccg agtatggctg acacaccacc ataaaagtaa tactcagtgt
20041 ttatcctata aagtcagggc agatattgac aaatttaagc agcaatgggc taaaatttgt
20101 acattgatgg actaataata tcaaaaacag cctatagccg tgtagtttgc ctaaactatg
20161 cctaacttta tctctgaaga tgacatcgaa caagcggtac tccgcaaatt agagcagcag
20221 cacggtttta aattactcaa ctgctacacc ccaaaccctg acgacctcaa cgacagttca
20281 aaccgcacag ataaacgaga tgtcattttt agcgatcgcc tgaaagctgc ggctatacgc
20341 ctcaacccca ccttaccaga aacagccata gatgaagctt taaaaatcct caccagtcaa
20401 cgtcagtcta tgtctcccat cgctgcaaat cgggaaatag acgggctgat tcgtgacggt
20461 atccccatac aatatgaaaa tgcccaaggt agaaccgaac ccatcaaagt acgagtaata
20521 gattttaacg atttcaggac agatttcaat aatgaatatt tagccgtttc ccaactgtgg
20581 attaaaggag aaagaaatta tcgccgtcct gacatcatcc tctacatcaa cggtttaccc
20641 ctggttttca ttgaactgaa aaattccaac gtcaaattac aaacagcctt tgacgataac
20701 ctcaccaact acaaaaaaga tattcctcaa ctcttccttg ccaatgcttt ctgcattctt
20761 tccaatgcac tagaaaccaa aattggcagt tttaccgcag actgggaaaa cttctttaac
20821 tggttacggg tagaagatga aaaggaaaaa ataaatcgtc agcagattca ggaatctggt
20881 actagcctag aacgagccat agatggtctt tgtcaccctg ccaaactcct agactacatc
20941 gagaatttta ttatttacag aagtggaact cagaaaattg tcgcccaaaa tcaccaattc
21001 attggtgtga atcgcgcaat tgatgccttt atccatcggg aagaaaaaca ggggaaatta
21061 ggcgttttct ggcacactca aggctcagga aagagctttt ctatgatttt ttatgtccga
21121 aagatttcgc gcaagctcaa aggcgatttt acctttgtgg tggtaacaga ccgggacgat
21181 ttagacgggc agatttaccg caatttctta aacaccgaaa ccgtccaaga gaaagaagct
21241 gctcaaccca aaaacagtaa acaactgcgg gattttcttt ctttcaacaa gcggatagtt
21301 tttaccttga ttcaaaaatt ccgctacaaa aagggcaaga agtatccaat attgagtgaa
21361 cgtaacgata tcatcgtcat tgttgatgaa gcacaccgca cacagtataa atccttagcg
21421 gaaaatatgc gggcaggttt acccaatgcc aactacctcg cgtttacagg tacacctctg
21481 ttaggtaaag aacgcaaaac taatgaatgg tttggggatt atgtcagcga atacaacttt
21541 tctcagtcaa tagatgatgg tgctactgtc cccctgtttt accagaagcg agtaccagag
21601 gtactgattc aaaacgagaa tttaagcgag gaattttacc aaatactcga agatgaaaac
21661 cttgatgata cgcaacaagc caagctagaa aggaaatttg cccgtgaaat tgaggtcatt
21721 aaacgtgacg atcgcttaga aacagtagcc aaagatatag tttaccactt tccccgtcgt
21781 ggttatctag gtaaaggttt ggtagtttcc gtagataaat tcactgctgt gaagatgtac
21841 gacaaagtac agtatcactg gaaagcagaa attaaaaatt tagtgggacg aattaggaaa
21901 tctaataatg aaatcgagaa agtgcgcctc aaaaagattc tcgattttat gcgcgaaaca
21961 gaaatggctg tagtgattag tttagaagga agcgagagcg aagagaaaaa atttgctcaa
22021 caaggactcg atatcaaacc ccaccgaaaa agaatgaata cccttgatgc tcaaggtcat
22081 gatatcgagt atcaattcaa agattcagaa aatcccctgc gcttggtgtt tgtctgtgcc
22141 atgtggttga caggttttga cctacctacc ttgtctactc tctacctaga caagcccatg
22201 aaagaccaca cgctgatgca aactatagcc cgtgcaaatc gcgttagtag ttatcagatt
22261 aataatgtca ctaaaaccaa cggcgagatt attgattact acaatgtctt ccgtgatatg
22321 aaaaaagccc tagcagctta cgctttgggc aatgatgaaa actccctagt tccagaaaaa
22381 tctgacctgt ttaaattact tgatgatgcg atcgcgcaag gactaaactt ttgtcatgaa
22441 cgaggcatta atctagaaac tatccttgcc agtcaagata ccttcaagaa cttagagcag
22501 tttaaccagt ttgccgacac cctactgcaa aaagatgaat ggcgtaaagc ctttgtggtt
22561 tatgacaata ccattacctc actctacgaa gcctgtaagc cagagatatt aaaccaacca
22621 cgccccctgg tgtcagtttt tcaatactta cgaggagtca ttgatagtat tatcgagcgc
22681 aaagatattg gtaacgtcag tttaaaaatt gccgagttat tagatgaaag tatagtcaca
22741 gatgatcaag gagtgaccac acaagagtat agtgcgaaat accaaattat ccagaaaggt
22801 gaagtttggg atttaagtaa aatcaactgt gagcagctaa aagccgaatt taaacacaaa
22861 ccctataaaa atattgcaat taccgattta aggagcttca tcgaagacaa gctcaaccgc
22921 atgattcagc aaaatactac tcgtacagac tttgcccaaa gactacaagc aatcattgac
22981 aaatataacg ctggtggttc atcaactgag aactactacg aagccctggt aaactttgcc
23041 gaaaacctga aacaagaagc agaacggcat attcgggaag gcttgacaga agacgaactg
23101 gaactatttg atttactcaa gaaagacaaa atgactgcgg atgaaaccca gaaagtcaaa
23161 ttagctgcca agtccctttt acagcgactc acagcagagc agccaaaagt tttagtgcaa
23221 gattggtata aagatatgca gagtcaacgc agggtgaaat ccgtagtgga agcagtctta
23281 gatcaaaatc tgcctgaaag ctatgatcga gcgttattta agtttaaatg cgacacagta
23341 tttgatttga tctatgacca ggccagtaaa ggtgcaaagt gggcagtctg agtaatggaa
23401 actatgtcta tctatgaacg cgatcgcatg aagacgaaaa tcagatttat gagatttgta
23461 cggctggcat aatttatcac tgctttcgac ttttcaagta gctctactta agcgataatt
23521 agaacttgaa gacacatgat gactataaca aaatgggcca gcatttatac gctttacttg
23581 ttggtatcga caactatcct gaccccaatc atcgccttca agggtgtgtg aacgacataa
23641 cagtaataca agagtatctt aacgaacggg tcgatcagca gcagtatgaa ctgcattcat
23701 tgatacttaa aaatagtgaa gccactcgtc aggcggttat taatggcttc cgcaaccatc
23761 tttgtcaagc tcaacaaaat gatatagttc tgttttacta cagcggtcat ggttctcagg
23821 agttagcacc gaaagaattt tggtatttag aaccagacca tctggatgaa actttagtat
23881 gttatgacag tcgtactgag aacggctggg atttggctga taaagaattg gcactactga
23941 ttggggaagt cgcagaaaac aacccccata tcacaattat tttagattgc tgtcactctg
24001 gttctggtac taaagatccc atgcagacag ctaaggaacg tcgcttcccc acagacaagc
24061 gatcacgtcc attagatagc tttatctttt ccctcgacga tttagagaga ctttcagata
24121 cccacaaccc cgaaaaacac ccgactgggt ggaaaatccc cagaggtcgt catgtacttt
24181 tagcagcttg tcgagaccac gaaacggcaa aggaatacta tggtggtggc caacaccggg
24241 gtagtttctc ctatttctta ctggataccc tttctaaaac taacggaaaa ctaacttatc
24301 gagatttatt tgcacgcacc aacgctattg tccgcagtga aattacagac cagtctcctc
24361 agttggaagt aaatgatcct gaagatgaca ataaattttt tctcgatcgc gtgatcgctg
24421 aacatgaccc ctattttatc gttcagaatc acagaaccta cggatgggta attgatggtg
24481 gtgcagttca cggagttcaa gcacctgaac atggagaaac tactttacta gcattgtttc
24541 cctttgatgc caatattgat gatctacgtg acccatcgaa atctgtgggt atagcaaaag
24601 ttactcaggt actaccaggt aagagcaaaa tagatattga aggtatacaa aacttagctg
24661 ctgataacac ttttaaagca gttgtgacga gtctacctct accaccttta ggagtgtact
24721 ttgagggaga tgaggatggt gtcaccatag caagggaaaa gctgagaaca gtgggtaatg
24781 gtaagtctcc atcaccatat ctccgcgaag agaaagaagc tagtcaagct gagtttcgtc
24841 tgttgtgtca caacaaccaa tatgtaatag ccaaaccaac agatagccga cctcttgtag
24901 aacagattga tggttacaca ccaaaaaatg cagaaatagc aattaaacgc ctagaacata
24961 ttgcccgttg gacaacaatt gctaaacttt caaatactgc ggcaactcgg attaaagctg
25021 gtgatgtgaa gatggaactt atctttgctg atgaggattt accacaatca aaccagatgc
25081 gtttgccata caaatataat aatggaacat ggcaacgacc agaatttaga cttaaactca
25141 ccaatacgac gaaaaagcca cttttctgtg ctttagttaa cctgtcagat agtttctcca
25201 ttagtacccc gttttttgaa gcaggtagca ttagactgga agcagaacag gaagcttatg
25261 ctttagatgg agaagaattg caactagaag tcccagacga gtattgggaa cagggtatca
25321 cggagtacaa agacattatt aaattgattg ttagtaatga tgagtttgat ccaagattgt
25381 taaatcaaag caaacttgat gctcctcggc ttaaagcaat agataggaat tatgcaaatc
25441 aaagtagtct tgatcggttg atggatcgta ctcaaaatcg agaaattaga gcgaaaagtg
25501 acgctgttag atttgatgat tggtacgctg aagaaatcac aattactaca gtccgtcccc
25561 tgcaatctac accagtttct cagcaacaag aacaacaatt aggcgcaggg gtaagattac
25621 aaccacatcc taatttagtg gcaaatgtta gcctcacaac tataccagaa gtgagccgag
25681 atttgggtaa caacattgta cctcctatct tgagagaaaa ttccgaagtt attcaaccgt
25741 tccaatttac tgccagtcgt gctactgacc ctggattaag tgtattggaa ttaaacgata
25801 ttcaagatta caaagttgtt actcctaatg cacctctaaa attatttgtt gatgcaccac
25861 tagcagataa tgagtatatt cttcctatcg gctatgacgg agaatttttc ttgccgttag
25921 gtcgtggtca taaaacttta catggtcaaa cagaaattga gatagaacaa ttaccagccc
25981 cagttagtca aggagagaaa agcctacaag gttctattcg catctttttt caaaaaatta
26041 tcaaccaaaa attaggaaaa aaatataact atcctctact cagagtagta gaagttaatg
26101 ataatcaaca agttaattat ctaccagatg aggtaactat taaccgagtt aaggaagcaa
26161 aaagaattgc tgtttatatt catggaatta ttggcgatac tgaaagttta gtggcaacca
26221 tcaaacagcc tatattacaa ccagacagac aaacagtttc tatcagcgaa ctttatgatc
26281 taattcttac ctttgactat gaaaatctca acacttccat tgaaaataat gctcaatatt
26341 taaaaaagcg attgagagat gtaggtctgg gagaaaatca cggcaaagaa ttacatatta
26401 ttgctcattc aatgggggga ttggtatctc gttggttcat tgaaagagaa ggaggaaata
26461 aagttgtcca acacttgatt atgttgggta caccgaatgc aggttctcct tggccagttg
26521 tagaagattg ggtaaaactc actttaggta ttgcacttaa tggtcttgct atcattgctt
26581 ggactgcaac tgtggtagct ggactaatgg gtgctttaga aagaaatatt cgggtagcat
26641 tagcccaaat gaacccagct tctgattttc tcaattctct agcagccagt gatgaccctg
26701 gtattcctta ctcaattatt gctggtaata cttctatgat tacatctgtt gttccagcag
26761 cattagagca acaaccagag aaaaattcta gtgtgctaga acgactcaag caaagtttat
26821 ttaatagagt tgtagcttta ccttttggtg gtgaaccgaa tgatattgct gtgacggtgg
26881 aaagtattaa tagcattcct caagggcgat cgcatcctcc ccatattcaa gaagtacctt
26941 gcgatcactt gagttacttc ctgaatcaac ctgatgaagt tgggttacaa gctttgattg
27001 cagctattac gaatcaagaa tattcttatg gagagttaca aaaaccttat aaagatcaag
27061 aattacaggg actttatgaa ggattacaag atttatggga aaaacaagaa attcatactt
27121 gttctatttg ctcgaatttt atcacagtta atcaaaaatt tgaaggtgct agtaatgttg
27181 agtctttcat tgcgaaaaac agaaaaaaag tggaaaatat aattgttgaa attaatagca
27241 catattcggc aaaagaaata aaagataact tacatcaaat tgcaattata gggttctaca
27301 gaagtaacag tttccgttcg ttacctgcaa ttatttccca aaaagataat tttttacaaa
27361 tcgagcttga agacattttt agctttttag atcctaaaga aaatcaacaa actgaaaata
27421 ttccatcttt ttcaacagag ataattttgt ttgccgttta ctatcagaag gagaataaac
27481 atggatacta agaaagtaga agaggtaagg aagacaggat gtactcttat tgcttttaaa
27541 gatggtaagt atgaaagagc agcatctgaa gattttaaaa cagaagctga catagttatt
27601 ttaattcatg gctttacgag tcatggagaa tacatgggtc aggaattagt accttatctt
27661 tatagtgaaa attatcaaat cttcttgttt aattatgatt cttacaaagg aatattatct
27721 gctgtaagga gtttacaaga attactggaa acgtatgata atctaactaa tcaaaaaata
27781 cgctccaaga aaatattcct tattgggcat agtatgggtg gtcttgtagc tcgtcaattt
27841 actatagatg atgcaaagaa ggacaattca gataggttta taaaaggagt gatcatgttg
27901 gctactccta ataatggtgt attacaaaat aaattaagta acgaaaattg gagaaatttt
27961 gttaagtatt taatatctgt ttcagaagaa ataggcggag tattcccaca agccagaaca
28021 ttggagtgcg tcgcggtaaa agaacttgct aaaattgatg agtataatat tattgataaa
28081 ttgaattacg aatgggaaaa gatgagttgc aatttgccac caagtttatc tatatctggt
28141 ggacaaaatt atcttgaatt cactaataaa ttaattgaag gaataattaa tcgtggaatt
28201 cagcaattaa tatctgattc taatacccgc tgccctaatg atggaattgt gcttgaatgc
28261 agtgttgata tgaactcatg tattagctat ccccaacaaa atcaacaata tatacacctg
28321 aataattatc atgaatattc aaataccaat cacaatacaa ttcatatcca acaaatagta
28381 tcaattaaaa ttgtagaatg gttacaaaca atcagcaaaa aaaatacgag tttactaaat
28441 aacgcataat aataaaattg attgtagtgc ttttgaattt ttagagttaa cataacaatt
28501 atgtctaaac ataaatttaa ccttaatttt gctattatta tcggtattaa taattatcaa
28561 agcgggatca aagagctaga aacggcagtt ccagatgcta ttaaacttgc tgaaattcta
28621 caaaagcagc atgatgctct aaaaccacaa tatcaagcac aaaataaata tgaagtgcaa
28681 ttatttttaa atcaacgcgc tggtcttaaa caactgaatc aattaattgc agattttaaa
28741 caaggtcaaa taccattaga cagaggtaaa gttacagtta cagaaaatga tcgcctcctt
28801 ttttactttg ctgggcatgg aattgcttta gatgctctag aaaatcaaga aggcccagtg
28861 ggttacttaa ttcctcaaga tgctatatca ggggatagca gtacctactt gccaatgcag
28921 gaattgcatg atgctttaaa ctcacttcct tgtaggcata tgttagcaat tcttgattgc
28981 tgctttgcag gagtatttcg ttgggcaagt ctaaaaagag aaattgtgcc taaagtaaaa
29041 gtatataagg aacgctacga ccgattcatt agcgatcgcg cttggcaagt aattacttct
29101 gctgctgatg accaaacagc tttagattct ttaggttcac ggggtatggt cacagagggg
29161 aacgaagttc attctccctt tgccaaagct ttgtttgatg gtttatttgg gaagggtgca
29221 gacctaaata aagatggtat catcaccgca actgagcttt acttgtattt aagagatcaa
29281 gtcgaaatcc ttacagaaaa taactacaag cggcaaaccc ctggtttgtg tccactgaaa
29341 aaacacgata aaggggaatt tatctttttg tcgtctgaat ttgaccgaaa taatttggag
29401 gatgcaccgc cactaaattt agaaaataat ccctatcgag gattagaatc ctatgatgaa
29461 aaacacagtc atttgttctt tggtagagaa gaacagatta aaaagcttta ccagaaagta
29521 gttgctaaca accagaagtt aacattagtt ttgggtgctt caggtactgg caaatccagt
29581 ttggtgaaag ccggacttat tcctaaactc aggaaagata aaacttggtt tatcctaccc
29641 ccttttcgac caggggagtc tcctttcaaa tcattgaata acgcactaga atcggttaag
29701 cagcctttga ttgctgcttc ctcaacgacg acaccttctc gtttgcttac cccagccgaa
29761 gaaagccttg caaattggtt taataatcat cctcaagcaa agctactggt ggttattgat
29821 cagtttgaag aactgataac tctgtgtaaa agtgacaaag agcgagagca atttgagcaa
29881 ctgattaaaa atgcaattac caaatatgcc gacaaaatcc atgtagttat caccttgcgg
29941 cttgactttg aagcacagct tcaaaactct gtacttgaaa agttctggaa tgatgagact
30001 cggtttgttg tcccaccaat gagccagaat gaatttcggg aagtgattga gaaacctgca
30061 ctagaaaaag ttatatattt tgaccctccc agcttggtag atgacttgat taacgaagtt
30121 gtacaaatgc cgggtgcttt acctttgctt tctttcaccc tcagtgaatt gtacttgaaa
30181 tatttgcagg agcggagaga taaccgggct ttaacgaaag aagattacga acagttagga
30241 agagtagttg gttctttaac caaacgagct aatcaggaat atgatcattt aattcaagaa
30301 aaccccgctt atgaaaacac tgtacaacag gtaatgttac gaatgatttc attgcagggt
30361 agggagtcag cacgacggca agttcctaaa tcggaactgg tgtatgccaa tgaggaagaa
30421 aataaacggg ttcaaagaat tattaaatgc ttttctgaag ctcgcttaat cgttgagggt
30481 tctaattctc aaggtgaacc ttatgtggaa ccagcacatg atgctttagt acaggggtgg
30541 gttaagttac aggagtggat taaacaagag caacagaatt tacctttaca acgacgattg
30601 acattagctg tccttgagtg gaaaactaag aaacaaagcc aagataggca agaagcaaag
30661 ttcctttgga atgccgatcc ttacttagat gttttaaaca aaatactcaa ttccagtgac
30721 aattggctta accaagtaga aactgagttt gttaagtgta gcaccaacct cagagaaaag
30781 aatcgtcgca ttagaatggg cttggttgct accgcattct cttttatctc catattttct
30841 tttatacaat ggaaacaaaa tcaagaagct cagagtatca acttgagtgt atcttcaaaa
30901 actttatttg ctgctgatca acaaatagaa gcgttagtag aagccataaa atctgggaaa
30961 aagctcaaat ctgtggttat accagaagca agtaccactc accaggttgt aacaactcta
31021 tatcaattag tttacagttc gatagagtat aatcgtttgc aagaagaaaa aggattttat
31081 cgtgctagtt ttagccctga tggcaagatg ctggtttcag taagtcagga caatattatc
31141 caattgtgga gcttagatgg taagaaactt aagaaaaatt ttaccagtaa tctttcaagt
31201 gtagatagca tcaactttag tcccaacggc aaaatgctgg ctctggcagg taataatgat
31261 aattttatcg aattttggaa tctggatgga gaagataaac ccaggacgct taaaggaaaa
31321 ctttcaaaaa caaatagtgt tagctttagc cccgatggta caatgctggc tttaggaagt
31381 aacgacggca tcatccaatt atggaattta gatagtaatg aagttaaaac ttttactact
31441 aatcttaaaa taaatagtgt tagctttagc cccgatggta caatgctggc tttaggaagt
31501 aacgacggca tcattcaatt gtgggatttt cgtagcaatg aaatcaaaaa ttttaatagt
31561 aagtataaaa taaaaaatgt tagctttagc cccgatggta caatgctggc ttcagtaagt
31621 acaggaatca ttcaattgtg gagcattcaa acaggcgaaa aaatcggtgc gggaagggaa
31681 ctcgtagggg atgtggattg ggttagtcgt gttagcttca gtcaagatgg caaaatgctg
31741 gcttcaggtg gctataacgg cattattaaa atctgggaca ctgaaacagg taaagaactc
31801 ttaagcatcc aagggagtcg aggtaggact ggtgcgtcaa ttatggatat cacttttagt
31861 cctaacggca agatgttagc ttcagtagat gatgacaagt ttatcaagct ctggaatctg
31921 aatggtgaga ataaatccaa gatgctcaag ggtcagcttt caaagataag gaatattagc
31981 tttagcccca acggcaagat gttggctttg gctggtgatg ataagtttat cgaactctgg
32041 aatctagatg gacaggataa acccagaaaa cttcaactac aagtttcaaa gataaggagt
32101 attggcttta gccctaacgg caagatgctg gctttagctg gcgatgataa gtttatcgaa
32161 ctccggaatt tagatgaaca gtatgaacag tatcaacctg gaaaacttct aggacataag
32221 tcacgtgtta atagtattag ttttagccct gatggcaaga tgctagcttc agcgagcgat
32281 gaccagacaa taaaactatg gagtctagat agaaacaaag aacccacaac tttaaaaggt
32341 catagtaatt tggtcaattt tgttagtttt agtcctgatg gcaacttcct agcttcatca
32401 agtaaagacc acactatcaa actctggaga ttgaaagaca ataaggaagt ctggagtaag
32461 aaaattgggt ctggttctgg tggccaaacc tggtgggttg gttttagccc tgatagcaca
32521 atattggctt cggtgggttc ttacaatttt atccagctct ggaatctaga cggtaacgaa
32581 ttcagaaggc ttagaggtaa tctttcaaat atcaatagtg tagccttcag tcccgacagc
32641 aagatgctag cctcagtaga aacgacagaa gattcagtag gtaaagcaga ggaaagcgtc
32701 atcaaattct taaacttaga ggggcttgaa ttcaataggc tcaaaagcca atttgtagat
32761 attaatacca tcagtttcag tcctgacggc aaacttttag ctgtaggagt tgaagatggc
32821 actgttatat tacacaactt agatttagat aatttattaa gacgcggatg tcattggata
32881 cgtgattatt tgcgaaataa ccctaatgtt agtgaggtcg atcgccatct ctgtgacgat
32941 gtaccaccaa ttactacaaa tcctgagaat taggtgagtt aaaagcgaac tgcaaccacc
33001 atatgtccaa atccaagtac gaattttacc gcgaccttgc agtaatcatt gggattaata
33061 actactcaaa tggtattcca gagttagaaa cgcctgtcgc tgacgctgaa aaattcgcca
33121 aaattctcca agataattat caatatgagg cgcagatatt actaaacgaa aaagcgacat
33181 tgaaagagtt aaattctcta ctggaggact tcaagcaaaa aaaattacgc ctaccagata
33241 aaactgtaca gatagaagaa aatgaccgct taatacttta ctttgctgga cacggaatcg
33301 tcctcagaga tgggctagaa aatacggata atctggaagg atatcttgtt ccccaagatg
33361 ctagaggaga tatcttgttg caaaacaata ttcttctacc tatgcaagac ttgcatgatg
33421 cactagcaca attaccttgc cgtcatttgc taattatact tgactgctgt tttgctgggg
33481 catttcggtc gagtttgtat agagaaattg tacctgcacg aaaagtttat aaacaacggt
33541 acgatcgctt tattagagat ccagcatggc aagcgatcgc atctgcggct catgaccaaa
33601 aagctattga ccatctaggt tgttttggac agagaggaag caaaggcaaa cactctcctt
33661 ttgcaaaagc tttgtttgac ggtttgctgg gtgctgctga cacaactcta agagaaggtg
33721 atggtattat cacagcaaca gaactttact gttatttacg cgatcgcgtt gaggaactaa
33781 ctgataaata tgacaaacgc caaactccag gtttatttcc tctgaaaaag catgataaag
33841 gcgagtatat cttcttgctt cccaacttcg accaaaacaa tttagaagat gcaccagcac
33901 tcaagcaaga aaacaatcct tatcggggtt taaagagcta tgaagaagaa cattctctcc
33961 tgttttttgg tagagatgaa cttgtcaaag aactatctac ccatgtttct caaaccaata
34021 acccactcac cgtagttttg ggtatttctg gttctggaaa gtcgagctta gtgaaagcag
34081 gactcattcc ttatttacga aaacatcata accaagaatg gtacatcata ccaactattc
34141 gcccaggaga taattctttc acttctctgg cagaggcact tgtagaaaag tctgaaacag
34201 atggaaatta cttaaacaaa attaaatctc taaatcagac attaaaacaa ataccacagg
34261 attttattaa gataatacaa gaattactac taatacctga aaaagtaaaa attttattag
34321 ttatagacca atttgaagaa ctaatcacag tttgtaatcc acaagaaaaa gaacaatttt
34381 taaatttcct tagcagtatt ttagaagctc atcctcagca aatttccatt gtattgactc
34441 tgcgttctga ctttgaacct cggtttttag attctgctct gaaagcatat tggacacaat
34501 ctcgttttcc tatacgagct atgagatccg atgaattacg gcaggcaatt gaacgacctg
34561 ctaacgaaaa aatgctcgat tttgacccac caaatttagt tgatcagttg attgacgaag
34621 tggggcaaat gccaggagca ttgtcgctat tatcttttac attgagtgaa ctatatatta
34681 aagccataaa tcgagaaagc agaactttaa gtaagactga ttacgataca ttaggcggag
34741 ttgcaggttc attaacacaa agagcaactc aggaatacca aacattagtg aaacttgatc
34801 cagcttatga acataccgtc cgccaactca tgctgagaat ggtagctatt gaaggtaatg
34861 aattagcacg acgacgagta ccaatgtcag aactggagta tgagagtgta gaaaaaaatc
34921 aaagggtgtc gcgggcgatt gctcagtttt cggcggcacg tctaattgtt gaaggtaaag
34981 aaactggtga cgaaccttat gttgaaccag cacacgatgc cttagtaagc gggtggaaca
35041 aactacagga atggaaaaat gatgagcaag gaagtttagt tttgcgtcaa cgcttaacac
35101 catctgctaa cgattggcta aaagatgggc gcaaatctga ttatctatgg attcgtgatc
35161 ctcgcctcgc tatcctggaa aaagtcctgg aattgccatc tgaagaaaac tggctcaatc
35221 agctagaaac agaatttgtg aacaccagta ttcagaaaag aaaggatgaa cttgaagaaa
35281 ctaaagaaca actccgcatt tctgaagagc gtcgtatcga agcagaaaag caaactgcga
35341 tcgcgcttgc tagaaattct gaagccttac tatcttctaa tcaacaatta gaagcactga
35401 ttgcagcagt aaaggcagga agaaaattac aaaatctact agcagaagaa gctatttctt
35461 cacaaagttt gttattcaag caaactgtgt tattcaagca aactgtgatt gccctagaac
35521 gagcagttta tggagtgaga gagcgtaacc gtttggaagg acatagcggg ccagttcaaa
35581 gcgtctgttt tagtcctgat ggcaagatga ttgccactgc tagttgggat aatacagtta
35641 agctatggag tagggaaggt aaagaactaa aaactctgaa aggacattat gatggtgttt
35701 taagtgtctg tttcagtcct gatggtcaaa ctgttgcctc aactggttgg gataacacga
35761 tcagaatatg gaatctggag ggacaggagc ttacacagca ccctctcgga tttggccata
35821 cagatcaggt atggtgtgtt tgttttagtc ctgacggaga aatgatcgcc tctgccagtc
35881 atgacaggag agttaaactg tggaataaag atggacagtt tctcagaaac ctttgtgaat
35941 caagtaccac cgagcatgaa ctaaccgtca gtagtgtttg ctttagtcct gatggaaaaa
36001 taattgctac tgcaagttat gataacacag ttaaactttg gaatcttgac ggtactttaa
36061 ttaaaagttt tacacatagc ggggcagttt atgatatcag tttcagcccc gatggtaaca
36121 ctattgtttc tgctagtgca gacaagacag taaaaatttg gagtttaaac ggcaaaaaac
36181 aaactcttaa aggacatgaa ggtgaattta cgagtgttag gtttagccct gatggaaaaa
36241 taattgcctc tggtagtaaa gataattcta tcaagctttg gagtaaagac ggtcaggaac
36301 ttacaactct cagagggcat actgcggaaa ttactagcat taattttagc cctgatggta
36361 atatcattgc ttctgctagt gaagattcaa ctgtcaagat ttggaacaaa gacggtcaac
36421 aaatcactat ccttccagaa tatggtgaag gggttactca agtctgtttt agtccagacg
36481 gcaaaacaat tgttggtaat gcgaaaaata cactcaaact ctggaatctt gatactcaag
36541 agagcaaaat gttttctgat attactggtg caaacaatgg tatcagtttc agttttagcc
36601 cagatggtaa cgcgatcgcg gtctgtggag gttttgacaa aatggttaaa ctttgcaatc
36661 ttgaaggcca agaaattaag aactctaacg attattatca cgcaataagg gctatccggt
36721 tcagccctga tggtaaaact attgctttta ataataataa aaagattgac ctttggaatt
36781 gggagaatca agagataaaa accctgtcag ggcatacagg caaggtttgt agtctatgtt
36841 tcagcccaga cagtaagata attgtttctg gtagtgatgg ttctgataag acaattaaac
36901 tgtggaacct aagcagtggt gaagttatca tccttgaagg tcatagtaat agtgtaaatc
36961 aagtctgttt cagtccagat ggcgaaataa ttgcttctgc cagttctgat aacacagtaa
37021 aactttggaa tcttaatgga caagaactaa aaactctccg aggtcatagc tatcaggtat
37081 ttgatgtaac ttttagcctt gatgggaaaa tgattgcttc tgctgattgg gatggcacaa
37141 tcaaactttg gaatcgtgat ggtcaactgc tcacaacttt agaaaaacga agtgaaaaac
37201 tatccagtat tagcttcagc ccggatgttc aaatcctggc tgctgccagt aataaaggag
37261 taattttatg gaacttcaat ttagatgact tagtagcacg tggttgtaat ttgttacatg
37321 aatacttaat gaataacact aatgttcaag aagagcaaaa tctctgcaat gacagatgaa
37381 taagcagtaa gcaatatacg caaaatagtt cacagaaaat aactgacatt ctcaaaacta
37441 aattagttat taacccaagt tgctagttat gccgaagagc gatcgcagtg ggttccattg
37501 ccgcttcaga atggatagtt aacatatact ctcaaggcga ctgtatttac tgcttccctg
37561 cgtggcgtag ccattcctgt tacttaatgt ttccggtttt agtcgatact attaccatag
37621 cagcaataga gggattactg attaagcttg ctctggagag cgatcgcaag ttattttgga
37681 acaaatagat gccaaatcct tacagggctt gctttcggca aattatatga cttttttatt
37741 tatcaatatg aggcatttct gaaaaattgt acaactttat tttttgatat caaataaaat
37801 tgaacgtaaa tacaaggctt ataaactttc aaattatata agttttttat gtttttacaa
37861 taatttggta gaataaccag ataatttctg aatgtgatga taatattatc acaatcagga
37921 atattttttt gggcgatcgc ctacggtgct gatgcgtcca cctcatcact tgtctataaa
37981 taaaaaacaa gcaggacata tactatgagc caaaaaacca ttgattccaa aaatctgacc
38041 atagaaaaaa tttttgaaga tttttatatt attcctagtt atcaaagaga atatatttgg
38101 aaagaaaaac aagtattaga gttattaaat gatgtatata gtgaatttcc tggctcttta
38161 aatatagaat ctgatgaata ttttctaggc agtattgtaa tttgtcctag ttctgaagat
38221 acagacaatg tgtatcaggt aattgatggg caacaaagat taacaacttc ttatatcttc
38281 ttttgtgctg tcaaaaatta tataaataag ttgccagaac atcaaaagtt tgatgcgatt
38341 aagaaattaa tttattcaga gtatacaaat gcacaaggtc aagaccaatc acaatacagg
38401 ataaatcctc aatatccaga cagtaaaaat attttggaag aatttgctaa agatgaaatc
38461 aatatagaag agatagaaaa taaaaaaaat aataaaactg aatctacaat taatttgatt
38521 tcagcttacc aaacaataga agattttatt aaggataagt tcaaagatga tgaaaaccag
38581 atcaaaaggt tttatgcaca tttcatcaaa aaagtaaagt tagttagagt tgaaactaca
38641 gatattaacc acgccttaag agtttttgaa accatcaata atagaggcgt tggcttggat
38701 tctatggatt tacttaaaaa tcttttgttt aaacaagttg aaaaagaaga tttttcaaaa
38761 attagtaatt cttggaaaga aataaaaaat gaattagatt cagtaaagga aaagcctatg
38821 gattttctac gatactttat tctaactcaa tatgatgttg aaagagataa tgtccaaact
38881 aaagaatacc aatggttact ggaaaataat actacttgta aatatgaaga aaaaccattt
38941 gagtttgtcg aggacttact gaaggctgca aaggcttata aatcattact agaaagaaaa
39001 aatccttctg ataattcaga taacccgcat ttagctaata ttaagtattt aagccccaat
39061 cttaaacaac atctatatat actgttagca gcaagggata tgtcaatgga aatattttct
39121 caattgtgtc tacatattga aaactttatt tttgtttata gttttcctaa taattcaatc
39181 agtgaattag aaaaaatatt tattaattgg ggtcaagaga ttcgtaaaat agtacaaaat
39241 acagacaaag aagagcaatt atctaaatta aaagaatttt tatataacaa tctaggtgta
39301 cgtaaagaaa atctcaagaa atcttttgag aaaaagttta aggaagcaag tcaattagac
39361 tttaattcaa gaggaacaaa taaaaagcca acatcaaatg ctaataaaaa aacaaagtat
39421 atattagcaa aaatttctca gtatgtacaa cttatagctt atagcgacaa tgatgagtgt
39481 aaaaatttta caacttttac tcagagttca atagaaattg agcatatttt accacaagat
39541 ttaaattctg aacctgttaa agcttttgat aaaccagatg aagttgaatc atatatatac
39601 aaattaggca atttagcttt gctagaacaa actctcaatg cttctattca aaatagtcca
39661 tttgaagtta agaaagaagc ttatcaacaa tcgaattttc ttttaacaca atgtatatct
39721 gaaaagccca ctattggaac taatactgca attaataggg ctgtggagaa attaataagt
39781 tttaatgaat ggaattcaca atcaattgat aaaagacaag aaatgctcac agaattagca
39841 ttgaaaatat ggtacgagga agtatctttc gaagaagtac cttttgagga aagtctggat
39901 gctagggaaa tacaggaact attgcggttt ggtggtgaaa gagctattta atttgatagc
39961 atctgatatc ctttctacac ctaaagtgcc agttgcgtaa gtcctgaaca tatatagata
40021 gaaagtgaga taagaacagg taagagtaag ctattcaaac acaacgccaa ttttcgattt
40081 gtaagttagg tattctttga aattctcgaa cattagatgt caccacaata tgattattga
40141 tgactgcggt agctgcgatg agtacatcat acgcaccaat aggtgaacca gctagtttga
40201 gaaagcttct gatttcggct gcttgttctg ctgctttcga gtcaaaaggt aaaattgtga
40261 ttgagtttaa taatgtttca aaaattgatt ggattttaac agcgcgttgt gggttaatag
40321 ctaatccata tttcacctcc ataactgtta gagatgacac aaaaatctcc gcaggggaaa
40381 ttaattttat tcgcttgagg gtgttttctt ctcctttgac aaaatcacta atgacgcaag
40441 tatccaatag ataacccata cataattaaa gttctatttc gttaggaggt atcagttcat
40501 ctcgatatga ttcaaagata atactttcgt ttacaccttg atattgtatt agggtttctg
40561 gccattggct gggtttagtt tctaggaatg tcacgaaaac aatgctttca gtaatacctt
40621 gcggtgtttc agctagttca attttgccgt ttttataaat tccttgaatg gtttttaaca
40681 tagagcttac ctcctacatt aagtttaacc tatttattct ccttcttcag tcatgctggg
40741 tgggaatcga atgtctgagt cttcaatata aattttacct gagatgagac gatttatcag
40801 gcgatcgcgt gtttgtttaa ggtgtaattt tactaattgg atataatcaa tttgattgtt
40861 caatttactt gcaaatttac aaaagtttac tgtgt
```

[0938] Features of the components in the IB18 locus above, e.g., TnsA, TnsB, TnsC, TniQ (TnsD), Cas5, Cas6, Cas7, Cas8, and CRISPR clusters are shown below.

| FEATURES | Location/Qualifiers |
|---|---|
| CDS | 265 .. 510 |
| | /product=“NA >cl_18381” |
| | /gene=“NA >cl_18381” |
| | /locus_tag=“NA >cl_18381” |
| | /label=“NA >cl 18381 CDS” |
| CDS | 735 .. 2609 |
| | /product=“NA >cl_19425” |
| | /gene=“NA >cl_19425” |
| | /locus_tag=“NA >cl 19425” |
| | /label=“NA >cl 19425 CDS” |
| glmS | 735 .. 2609 |
| | /created_by=“makoto” |
| | /label=“glmS” |
| ITR | 2634 .. 2700 |
| | /created_by=“makoto” |
| | /label=“Right End” |
| motif_3 | 2642 .. 2660 |
| | /Mismatches=0 |
| | /%_Identity=100 |
| | /Motif=“[AC][AC][TA]AA[AT]AAAGT[TC][AG]TA[CT]AN[TC]” |
| | /annotation_group=“AttTn7_cluster_2: 7,354,202 -> |
| | 7,354,220” |
| | /label=“AttTn7_cluster 2” |
| motif_3 | 2662 .. 2680 |
| | /Mismatches=0 |
| | /%_Identity=100 |
| | /Motif=“[AC][AC][TA]AA[AT]AAAGT[TC][AG]TA[CT]AN[TC]” |
| | /annotation_group=“AttTn7_cluster_2: 7,354,222 -> |
| | 7,354,240” |
| | /label=“AttTn7_cluster_2” |
| motif_3 | 2682 .. 2700 |
| | /Mismatches=1 |
| | /%_Identity=“94.73684210526316” |
| | /Motif=“[AC][AC][TAJAA[AT]AAAGT[TC][AG]TA[CT]AN[TC]” |
| | /annotation_group=“AttTn7_cluster_2: 7,354,242 -> |
| | 7,354,260” |
| | /label=“AttTn7_cluster 2” |
| tnsA | 2742 .. 3557 |
| | /product=“1-272\|id:63.235@bs:384” |
| | /gene=“1-272\|id:63.235@bs:384” |
| | /locus_tag=“1-272\|id:63.235@bs:384” |
| | /label=“1-272\|id:63.235@bs:384 tnsA” |
| CDS | 2742 .. 3560 |
| | /product=“tnsA_10 >cl_27484” |
| | /gene=“tnsA_10 >cl 27484” |
| | /locus_tag=“tnsA_10 >cl_27484” |
| | /label=“tnsA 10 >cl 27484 CDS” |
| tnsB | 3581 .. 5809 |
| | /product=“1-741\|id:67.738@bs:1002” |
| | /gene=“1-741\|id:67.738@bs:1002” |
| | /locus_tag=“1-741\|id:67.738@bs:1002” |
| | /label=“1-741\|id:67.738@bs:1002 tnsB” |
| CDS | 3581 .. 5812 |
| | /product=“tnsB_11 >cl_26522” |
| | /gene=“tnsB_11 >cl_26522” |
| | /locus_tag=“tnsB_11 >cl_26522” |
| | /label=“tnsB 11 >cl 26522 CDS” |
| CDS | 5802 .. 7475 |
| | /product=“NA >cl_6196” |
| | /gene=“NA >cl_6196” |
| | /locus_tag=“NA >cl_6196” |
| | /label=“NA >cl 6196 CDS” |
| tnsC | 5832 .. 7472 |
| | /product=“18-568\|id:62.976@bs:712” |
| | /gene=“18-568\|id:62.976@bs:712” |
| | /locus_tag=“18-568\|id:62.976@bs:712” |
| | /label=“18-568\|id:62.976@bs:712 tnsC” |
| tniQ | 7483 .. 8445 |
| | /product=“1-315\|id:40.683@bs:231” |
| | /gene=“1-315\|id:40.683@bs:231” |
| | /locus_tag=“1-315\|id:40.683@bs:231” |
| | /label=“1-315\|id:40.683@bs:231 tniQ” |
| CDS | 7483 .. 8430 |
| | /product=“NA >cl_2402” |
| | /gene=“NA >cl_2402” |
| | /locus_tag=“NA >cl_2402” |
| | /label=“NA >cl 2402 CDS” |
| cas6 | 8603 .. 9283 |
| | /product=“1-227\|id:90.308@bs:421” |
| | /gene=“1-227\|id:90.308@bs:421” |
| | /locus_tag=“1-227\|id:90.308@bs:421” |
| | /label=“1-227\|id:90.308@bs:421 cas6” |
| CDS | 8603 .. 9286 |
| | /product=“NA >cl_11380” |
| | /gene=“NA >cl_11380” |
| | /locus_tag=“NA >cl_11380” |
| | /label=“NA >cl 11380 CDS” |
| cas8 | 9304 .. 10839 |
| | /product=“1-512\|id:88.867@bs:952” |
| | /gene=“1-512\|id:88.867@bs:952” |
| | /locus_tag=“1-512\|id:88.867@bs:952” |
| | /label=“1-512\|id:88.867@bs:952 cas8” |
| CDS | 9307 .. 10803 |
| | /product=“devT_12 >cl_6205” |
| | /gene=“devT_12 >cl_6205” |
| | /locus_tag=“devT_12 >cl_6205” |
| | /label=“devT 12 >cl 6205 CDS” |
| cas7 | 10901 .. 11872 |
| | /product=“1-324\|id:90.123@bs:493” |
| | /gene=“1-324\|id:90.123@bs:493” |
| | /locus_tag=“1-324\|id:90.123@bs:493” |
| | /label=“1-324\|id:90.123@bs:493 cas7” |
| CDS | 10901 .. 11875 |
| | /product=“devR_22 >cl_17591” |
| | /gene=“devR_22 >cl_17591” |
| | /locus_tag=“devR_22 >cl_17591” |
| | /label=“devR 22 >cl 17591 CDS” |
| cas5 | 11877 .. 12506 |
| | /product=“1-210\|id:89.048@bs:396” |
| | /gene=“1-210\|id:89.048@bs:396” |
| | /locus_tag=“1-210\|id:89.048@bs:396” |
| | /label=“1-210\|id:89.048@bs:396 cas5” |
| CDS | 11877 .. 12509 |
| | /product=“devS_14 >cl_25717” |
| | /gene=“devS_14 >cl_25717” |
| | /locus_tag=“devS_14 >cl_25717” |
| | /label=“devS 14 >cl 25717 CDS” |
| CRISPR | complement(12786 .. 13107) |
| | /product=“5 ACTGCTCAACGTCTAACGACATCTAATGTTAAAGCAC” (SEQ ID NO: 66) |
| | /gene=“5 ACTGCTCAACGTCTAACGACATCTAATGTTAAAGCAC” (SEQ ID NO: 67) |
| | /locus_tag=“5 ACTGCTCAACGTCTAACGACATCTAATGTTAAAGCAC” (SEQ ID NO: 68) |
| | /label=“5 ACTGCTCAACGTCTAACGACATCTAATGTTAAAGCAC CRISPR” (SEQ ID NO: 69) |
| CDS | complement(13305 .. 13535) |
| | /product=“NA >cl_2538” |
| | /gene=“NA >cl_2538” |
| | /locus_tag=“NA >cl_2538” |
| | /label=“NA >cl 2538 CDS” |
| tniQ | 13829 .. 15736 |
| | /product=“1-636\|id:91.038@bs:1200” |
| | /gene=“1-636\|id:91.038@bs:1200” |
| | /locus_tag=“1-636\|id:91.038@bs:1200” |
| | /label=“1-636\|id:91.038@bs:1200 tniQ” |
| CDS | 13829 .. 15739 |
| | /product=“NA >cl_1243” |
| | /gene=“NA >cl_1243” |
| | /locus_tag=“NA >cl_1243” |
| | /label=“NA >cl 1243 CDS” |
| CDS | complement(15782 .. 16087) |
| | /product=“NA >cl_14703” |
| | /gene=“NA >cl_14703” |
| | /locus_tag=“NA >cl_14703” |
| | /label=“NA >cl 14703 CDS” |
| CDS | complement(16245 .. 16538) |
| | /product=“NA >cl_2353” |
| | /gene=“NA >cl_2353” |
| | /locus_tag=“NA >cl_2353” |
| | /label=“NA >cl 2353 CDS” |
| CDS | 16744 .. 18837 |
| | /product=“NA >nocl” |
| | /gene=“NA >nocl” |
| | /locus_tag=“NA >nocl” |
| | /label=“NA >nocl CDS” |
| CDS | 18834 .. 20024 |
| | /product=“NA >nocl” |
| | /gene=“NA >nocl” |
| | /locus_tag=“NA >nocl” |
| | /label=“NA >nocl CDS” |
| CDS | 20158 .. 23391 |
| | /product=“NA >cl_16927” |
| | /gene=“NA >cl_16927” |
| | /locus_tag=“NA >cl_16927” |
| | /label=“NA >cl 16927 CDS” |
| CDS | 23553 .. 27491 |
| | /product=“NA >cl_9573” |
| | /gene=“NA >cl_9573” |
| | /locus_tag=“NA >cl_9573” |
| | /label=“NA >cl 9573 CDS” |
| CDS | 27481 .. 28449 |
| | /product=“NA >nocl” |
| | /gene=“NA >nocl” |
| | /locus_tag=“NA >nocl” |
| | /label=“NA >nocl CDS” |
| CDS | 28501 .. 32973 |
| | /product=“tolB_48 >cl_2719” |
| | /gene=“tolB_48 >cl_2719” |
| | /locus_tag=“tolB_48 >cl_2719” |
| | /label=“tolB 48 >cl 2719 CDS” |
| CRISPR | complement(31332 .. 31631) |

/product=“3ATGCCGTCGTTACTTCCTAAAGCCAGCATTGTACCATCGGGGCTAAAGCTAACACTATT T”
(SEQ ID NO: 70)
/gene=“3ATGCCGTCGTTACTTCCTAAAGCCAGCATTGTACCATCGGGGCTAAAGCTAACACTATT T”
(SEQ ID NO: 71)
/locus_tag=“3ATGCCGTCGTTACTTCCTAAAGCCAGCATTGTACCATCGGGGCTAAAGCTAACACTATT T”
(SEQ ID NO: 72)
/label=“3ATGCCGTCGTTACTTCCTAAAGCCAGCATTGTACCATCGGGGCTAAAGCTAACACTATT T CRISPR”
(SEQ ID NO: 73)

| | |
|---|---|
| CDS | 33003 .. 37379 |
| | /product=“tolB_47 >cl_2719” |
| | /gene=“tolB_47 >cl_2719” |
| | /locus_tag=“tolB_47 >cl_2719” |
| | /label=“tolB 47 >cl 2719 CDS” |
| ITR | complement(37722 .. 37859) |
| | /created_by=“makoto” |
| | /modified_by=“makoto” |
| | /label=“Left End” |
| motif_3 | complement(37722 .. 37740) |
| | /Mismatches=0 |
| | /%_Identity=100 |
| | /Motif=“[AC][AC][TAJAA[AT]AAAGT[TC][AG]TA[CT]AN[TC]” |
| | /annotation_group=“AttTn7_cluster_2: 7,389,282 <- |
| | 7,389,300” |
| | /label=“AttTn7_cluster_2” |
| motif_3 | complement(37766 .. 37784) |
| | /Mismatches=0 |
| | /%_Identity=100 |
| | /Motif=“[AC][AC][TAJAA[AT]AAAGT[TC][AG]TA[CT]AN[TC]” |
| | /annotation_group=“AttTn7_cluster_2: 7,389,326 <- |
| | 7,389,344” |
| | /label=“AttTn7_cluster_2” |
| motif_3 | complement(37833 .. 37851) |
| | /Mismatches=1 |
| | /%_Identity=“94.73684210526316” |
| | /Motif=“[AC][AC][TAJAA[AT]AAAGT[TC][AG]TA[CT]AN[TC]” |
| | /annotation_group=“AttTn7_cluster_2: 7,389,393 <- |
| | 7,389,411” |
| | /label=“AttTn7_cluster 2” |
| CDS | 38005 .. 39951 |
| | /product=“NA >cl_7816” |
| | /gene=“NA >cl_7816” |
| | /locus_tag=“NA >cl_7816” |
| | /label=“NA >cl 7816 CDS” |
| | complement(40055 .. 40459) |
| CDS | /product=“NA >cl_13569” |
| | /gene=“NA >cl_13569” |
| | /locus_tag=“NA >cl_13569” |
| | /label=“NA >cl 13569 CDS” |
| CDS | complement(40466 .. 40681) |
| | /product=“NA >nocl” |
| | /gene=“NA >nocl” |
| | /locus_tag=“NA >nocl” |
| | /label=“NA >nocl CDS” |

[0939] The map of IB28 locus is shown in FIG. 54. The sequence of IB28 locus is shown below.

```
IB28-CAST locus (39,833 bp); Accession:
133464|0|GCA_002368215.1_ASM236821v1_genomic|
AP018184.1|6522801|Nostoc
(SEQ ID NO: 74)
        1 ttataaaaat acctagtggc caaaggagca aacctgctcc ttttttcttt ggtaaagttt
      61 gttgatgatt aacggttgac tgtggactat ggactattga ctatgaactg ttgactatac
    121 tggaatttaa ttctcttgaa gaaagggtgg tgtgagcaat gtgtggcatc gttgggtata
    181 ttggcactca agcagcgaca gaaatcttat tatctgggct ggaaaagtta gagtatcggg
    241 gttatgactc agcaggtgta gctacgcttt gggaaggtga ggttcactgt gtccgagcca
    301 agggcaaact gcataacctc cgttctaaac tagagcaact agtaacctcc tctcaaatcg
    361 gaattggtca tacacgctgg gcgactcatg gtaaaccaga ggagcataac gcccatcctc
    421 atttagatac agcaaggcgc atagctgttg tccaaaatgg gattattgaa aattaccgcg
    481 agttacggga agaactgaag cagaaaggat atgagtttcg ttctgaaacc gatacagaag
    541 ttattcctca cctcatagcc gaattgtcaa aaaatgcctc ctcttttcta gaagcagtac
    601 gccaagctgt tagccatctg catggagcat ttgcgatcgc cgtcatttcg gctgattacc
    661 ccgacgaatt gattgttgtc cgccagcaag cgccgttagt gataggattt ggtcaaggtg
    721 agtttttctg tgcttcagat acgccagcca tagtttccca tacccgcgcc gtcttacccc
    781 tggagaatgg cgaaatcgcc cgtcttacac ccttgggagt agagatttat aactttgctg
    841 gcgacaggct caaaaaacaa ccccggatgc tcaacttgag tcccacgatg gtagaaaagc
    901 agggattcaa gcactttatg ctcaaggaga tttatgagca accaggagtt gttagagcaa
    961 gtttagacgc atactttaat acagaggtta attctggtaa atcattccaa tcaccagtta
  1021 agttaggttt acccgaacag ttctacgcag acttagaaca aattcatatt gttgcttgcg
  1081 gtacaagttg gcacgccgct ttagtaggga agtatttact tgaacaatta gcaggaatct
  1141 ctactcaggt acattatgct tctgagtatc gttatgcacc atcaccgcta acagcgaata
  1201 cattaattat tggcgttacg cagtctgggg aaacagctga taccttagca gccttagcaa
  1261 tggaaaaaga acgccgtcaa ggtaaagaag caaaatatca agcgcaattc ttgggtatta
  1321 ccaatcgccc agagagtagc cttggtcatc ttgtacccca tattatcaac accttggcag
  1381 gaattgaaat cggtgtggca gcaactaaaa cctttgtcgc ccaactgatg gcgttttatg
  1441 ccctagcctt agatttagcc tatcatcgtc aaactgtagc gccggataaa ttagcagata
  1501 ttattcaagg tttgcgccag atacccaagg aaatagaaga aaccttagaa cgccaagaaa
  1561 aattaacgga acatttagct catgaatttg cagagactca agacttcatc tttttgggta
  1621 gagggattaa tttccccatt gcattggaag gggctttgaa attaaaagaa attagctata
  1681 ttcacgctga aggttatccg gctggggaaa tgaaacatgg ccccattgct ttattagatg
  1741 caaaagtgcc agtagtggcg atcgctttcc ctggtactgt gtatgagaaa gtcatttcca
  1801 actctcagga agccaaagcc agagattccc gcttaattgg cgtaacgcca gtcagcgatg
  1861 gcgaagccgg ggaaatcttt aatgatttac ttcccgtttc ccctgtggat gaattacttt
  1921 cacccatcct cacagtagta cctttgcaac tattggctta ccacatcgcc gcccgtcgcg
  1981 gtttggatgt cgatcagcca aggaatcttg ctaagagcgt tactgttgag tagtgttgaa
  2041 tcgagaaata ttgaggttgt ggaaacataa taaagttgta caataaataa taaagttgta
  2101 caatgcctaa taaagttata caatttctcc tatgggtgag tataattcca tctgtaggag
  2161 attgtcttta tggctagaac caagcaagag tggacgcaag ctaagtttga gcgctacatg
  2221 aaggaaggtc gaggtcaggg tagtggaaaa aattatcaac cgtggataaa aattcaagat
  2281 tttcccgtga agggtagggt atctagacca cccggttgga aaacaaaccg agagcatcat
  2341 ctgttctccg atcatgagaa acggttattt tatttgtttg agtggtcgga cagcattatt
  2401 gatataaggg aacaattccc tttaattgac ttagacttag cgatgaacat tgctaccgaa
  2461 atggcgattg agtatcccaa agatgttaat aataatactc cctatgtttt aactacagac
  2521 tttatgttat ctgtgaagca aggaaagcag atagttgaaa aagctcgcac tttcaaatta
  2581 gttaaggatt taggaattaa atctgttgct gaaaaatttg agttagaaaa gcgttattac
  2641 acagcaaaag ggattgattg gggtattatt acggaaaaag aaattcctac gcttttagta
  2701 aaaaatgttg agtggattca ttctagttat aagttagaag cagccgcaga aatcaatgtt
  2761 gatgagttga ataacatcgc aaatatttta aagtcaaaat tgcaagaaag cgattctact
  2821 attaataaaa ttacaaattg cttagataaa gagatgaatc tagaaatagg tacgtcactc
  2881 tacattttta agcatctcct tgccaataag aaaataatca tggatatgca aacaaatgca
  2941 atatctagtt ctatttcagc gcgagaaatt caaaaaatca ttttctagaa atttatattg
  3001 gttgttccca tgaataataa tttgtttgtt aatgacttaa ttgagtggat tgacgaatca
  3061 ggaaacaact ttgtagagag aattatttgg attgatgaag cctatatcat tgcctttacg
  3121 atagatataa atatcaaaac tggatttcca gtgtctaaaa gagtatcaga tatccaagaa
  3181 gcaatttatg aaggtcgtgc attgaagttg aggacagacc cttgggcaag aatcgttaga
  3241 gatgaagact tatctgctaa agaaaaagaa attagagata agtattggga tattatttca
  3301 tctatagtaa ttcaagaacc atctatatac tatcgagata aacgaggctc gctcattaaa
  3361 caagttatag aaaaatataa taataataag agcgaaggaa aattaattga aagaagcgtt
  3421 tatcagatta ttaggagata ctggcaaaga ggtaaagata aaaactctct cttacctgat
  3481 tatgcaaatt ccggtggcaa aggcaaagta agagcatcta gagaaaaaaa gagaggaaga
  3541 ccaagaaaat atgctcatga gccagacatc ggtgtaggta taaatataac cgatgaagat
  3601 aagaaaatat ttagattagc agttactaag ttttatcaca atcaaaaaga aaactttttg
  3661 acaactgctt atgatttaat gattaaaaac tattattcag aggaaactat ttacgatgag
  3721 aatggcgtta aaaaacatat attaattccc ccagataaac gaccaacatt aacccagttt
  3781 aaatattggt atgacgttga acaaggagac attagaaaaa aaataatttc tcgtagggga
  3841 gctaaaaaat atgctctgga acatagagca attacaggaa actcaacaat ggaaactatt
  3901 gggcctggtt ctagatacca aatagatgcg acgatcgcag acgtgtacct agtttctgcg
  3961 tacaatcgca actggattgt tggtagacct gttatctatg tagtcatcga tgtttttagc
  4021 cggatgataa caggagttta tgttgggttt gaaggccctt cttggatagg agcaatgatg
  4081 gctttagcaa atgcagccag tgataaagta gcattttgca aagaatacgg tatcgagatt
  4141 acagaagatg aatgggcttg tcatcatatt cctgatgcaa ttttaggcga tcgcggcgag
  4201 ttagcaggga tggcagtaga aacactaatt cccaatcttg gtattcgtat cgaaaatgct
  4261 gcaccctacc gagcagattg gaagggttta gtagaaagac attttggcat tatccacggt
  4321 catatcaaac catttgtgcc aggttacata gacaaggatt ttagggaaag aggagcaaga
  4381 gattatcgac ttgatagcaa gcttgatata gagcagttta ctgaaattat tatcaagatc
  4441 atcctttacc acaacaatga acattactta gataactatg aaagagatga ggcaatgata
  4501 gctgatgatg ttccccccat acctagagaa ttatggcagt ggggaattgc aaatcgttca
  4561 ggtagactta ggactattcc tgaagatatt gttaagctga acttaatgcc aacagaaaac
  4621 gcaacgatta ccgaacgtgg cattaaattt aaaggaatgt actacacctg tcaaaaagca
  4681 aaaaacgaat tttggtttga gaaagctaga agtaattctc tttctaggtt agagaaaaaa
  4741 ttagaaattt catatgacat tagaaaacct gattatatat atcttcgctc tcctgatggt
  4801 agaaactttg agaaatgttt tcttttagaa tcagaatcaa aatattttaa taaaaattta
  4861 catgaaattg aatatttatt tgcttttgaa gagttacaaa aacaaaaaaa taaaggttta
  4921 aaacaacaac agaaagtaga cttaatcgca gaaattgaaa gtgtcgtgaa taaagcaaaa
  4981 aaaatgaccg aggaaatgaa agatgataaa ctgagcaata gaaaaagaac cgcaggtatt
  5041 cgagataata gaagtgctga aaaatctaaa cgtcgaaaaa ttgaaggctt tgagctagaa
  5101 aagagtgatc atgaaaatac tagtaatact gtggatattg aaagtcaaaa agtagagcag
  5161 ccacaatcat tgcaacctaa ctatcttgat attcttcgtc agaagcgaga ggaacgaaag
  5221 cgtgaacaag ataaatgatt ggaaatgggt tgaaattcca aatggtaaat ctgctgctgt
  5281 agctaaatat aatgaccata aattaccaga gtacaataat aaccctttaa ttcaagcatt
  5341 acctccaatt ctttctggag aagaatttat tgaaaaagca ataatactcc ccagttacgc
  5401 acctgaagag agggaaatgg atgcacaccg tcgatttcac tgcgttgaac gattatctag
  5461 atactttcaa cctttaaata aaacggttaa tttacagcag gttatgtgtg cattattaat
  5521 gcagggctac atagcacgta atatttccaa acctgaatat gcacgccgat cccgacaaat
  5581 ttatgaagcg ataaaagcgg gagatggtag aaatttagat gtttatgtaa atgttcccac
  5641 atccacatcc gcatctggtt taacattaat tggcccatca ggcatgggta aatctactaa
  5701 ttttattaat attcttaatt tatatcctca agtaattcta catccagaat acagtactta
  5761 ccaaattgtt tggttaaaag tcgattgtcc tcatgctggt tctctcaaag gcttatgtac
  5821 agatatattt cttggtatag ataggttact gggaaccaac tattttaaaa aatttggtgc
  5881 atcacgaaat tctgaagatt atatgctggc traagttgcc caaatggctc atactcacca
  5941 tttgggagtc ttagtgattg atgagatgca aaatttagta acagcaagaa gaagttgctc
  6001 tgatatgctg aatttcttag taaaaatgga taacatcatt ggagttcctg ttatccgtat
  6061 tggtaccaat gaagcttttc caattcttca aggtaatttt aggaatgcta gaaggggaac
  6121 tggtgaagga agcgttattt gggacaggat gagaaatgat gatgaatggt acttttttat
  6181 ggagaccatg tgggagtatc aatggacaaa aatatctact gatttttctg atgagtttaa
  6241 tgatgttttt tatgatgaaa gtcaaggaat tattgatatt gccattaaac tttataaaat
  6301 ggttcaatgg agagctattt cactgggtgg aaaagaggca ataaacgcca atttaattaa
  6361 acaatctgtt aaagacggat tatttttagt aaaaccaatg ctaaatgcta tccgttctgg
  6421 agacaaggaa tggatgatta agtataaaga tatagctcct attgatacta cagaatatta
  6481 caataattgt ttatctaatt tagaaactaa agatttaaaa gaaattagta gattagcgaa
  6541 aaaacagcaa gctgagaatg gacatttatc agcgacacaa cgtcatataa ttcttaaact
  6601 tttagaatta gatgtagaac cgcaattagc caaagaatgt gcagtacaag taattaattc
  6661 tggcgaagaa gatgctgata ttcctatttt ggtaaaacaa gcttatgctc tagctttggg
  6721 tgggcaagtt caggaggcta ctgtaaagaa agtgagaacg cacacactaa aagcaaagcc
  6781 aaaatatcaa ataaacgata ttcgacaaat tgcggaaaaa gcaaagaaaa atcaaactag
  6841 tgcatatgaa ggtttgaaat cgacaggaat tatcaaagat ccagtccagg attttatcac
  6901 tatcacctaa ttatatgctt agtttctttc caacactata tcctgatgaa ctgttatata
  6961 gtgctttggc tagatatcat atacggagtg gcaataaaac ctttaagcaa actgatttag
  7021 aattatttgg ttacagttct cagcaactat gtaaagttac tttaaccaat aatttgaatt
  7081 atttagttaa aaacttgtct ttattttctc agttaacagt tagtgattta ctacaaaatc
  7141 ataccctata ccctttttat gcaagtttct taatacccca gcaagcttgg caattacaag
  7201 actctatgag gaaaaagcta ggtggctcta ttttagaggt tgcaaaagta gctaatcact
  7261 ctgctgacaa ctcaacaaag tttttaaagt tttgtcctat atgtctagaa caagatacac
  7321 aggaatatgg tgaaccatac tggcatcgaa ttcaccaaat acctggtata ttagtttgtg
  7381 caacccatag agttgttttg catgatagct ctgtagctgt tgattctaag ggtatccatt
  7441 attatgcagc gagtccagag aattgtctca ccaatcaaaa tcaagtgaaa tgcgctgata
  7501 acactgtaga aaagttatta atcttagctc atgatatttg gaatataagt actattaata
  7561 ttccttttaa aggtttaact tggctccgca atcaatatca gtcctattta attaatcaaa
  7621 agtttatgac cctcctacct ggggagaaat ttagatttaa cgaaaaatct ttttcaaatt
  7681 ctatctgtga tttttatgga caagagtttc tagaaataat taatccaaat ttaatcagga
  7741 atccagacaa atatttttct ggttatttac tagcttgtga tttgaatcca gtaatcgacc
  7801 ggattacaca tatattgata ataaaatttt tagctaattc tgtagaaata ttttttacat
  7861 aacatacttg ttagagtact taatatataa aaatattttt tagcaaaaaa tatattaatt
  7921 tacttgaaat tgcataccga ttaaagatgt agcaatagag tatggtagag aaacaacata
  7981 aattaagctc agaagtagcg atttttcaga gaaatgaaat aaatgggtga taattttcac
  8041 gtatcaactc agagccatgc tacagaggtt ttaaatcctc agttaatcta cgtggactta
  8101 agctttcgtg taattggtca gactttaccc atagaccacg gctatgcttt gtatgctgca
  8161 ctgactcact tacaggacaa acttcattct ctagatgacc tcagcattca aactattcct
  8221 ggcattcctg atggcaacga ttcacttcat cttaataacc actctaggct tcggattcgg
  8281 ctaccagtag ataaaatacc tttagtttat ccgtttgcag gtaaatcact aacaattggc
  8341 aggcataaga ttcatttaga aattccccaa atgtatcttc ttcaagcggt ggagaaattg
  8401 cgatcgcgta ttgtggttat caaaggctac gaagaaccaa agggtttttt agcagcagcg
  8461 cagcgtcaac tggaaaaact gggtgtccag ggaatagcca gtatacctac caaagctgat
  8521 ggcaaaccag aacgcagaag tatcaaaatt aagaaattta cagttgtggg ttttggattg
  8581 gaggtaacga atttaaatga tgaagattca ataaccttgc aaaaatacgg tgttggcggg
  8641 aagcaaaaaa tgggttgtgg agtttttgta ccagttaacg aaaaacgata gcagttgttt
  8701 aaaggcagat gataaataca acagctaact ccaaaattca gttaaatctg agcgactcta
  8761 gcactacttt gttacatcgc gcagggatag caggattttg gatgacgcta aaacagttgg
  8821 aagaaatata tccgaatcct gctcaacgta ctggtaattt aacctgggta ctaacacccc
  8881 atagcatcag tcttaactgg gaagggcagg atttcgcagc tttagactgg ttgctaaagc
  8941 aatcttttca aattagtgat gagggtttaa ttttcctgac aggattaaat ccaaaagcaa
  9001 ttcatattga aagacaaata ataatccatc aaggtattac aggaactttt ttacagcaca
  9061 ataaattttt caaattttca gacaaaaaat taaagtccat aattgttgac ggcagacaat
  9121 ttgtgactga gtacaaaagt gctatgtctt atgctcatca gcactttgct aaaaagttgt
  9181 gtgatgaatc tggccaattg ttacaagagc ctattggcat agtaggttgg ctgtatccag
  9241 gagcagtagt tcgtcattct gcttttccaa aacaaaccaa atttgaagag aagccagagt
  9301 atgcactagc gttattgttt gtgcctgtag cgtgccacta ttttattttg cgatcgcaca
  9361 ccaaacccca atctacaaac tatattctgg ttgtccccga agtaaataat ttagagtttt
  9421 acgcccagca ttgctggaat ctgagtaatt tgagttacag agattttcat gtatctagct
  9481 taagagacgc tggattaaaa ttcctgacta atgaagcagc aatacagata aaacaaaatt
  9541 gtgttaagcg atgtcaggtt ttttcttttg ggacgctaat ttggtcagaa cagcaaaaag
  9601 ttcgtacaga aacagcaaca ttagagctaa cggaaaaagt gagcttctac tataagttta
  9661 gtcggagttg tttctccaat taccgaatcg ttgactatga aaatcaacat tttatcctta
  9721 caagtctagt tcaaggaata attgctaata atttaggttt agggttgcct tggtggaatg
  9781 attttggcaa catacttaca tctagtaatt tgtttaatca aatagctgat gaaaatcaag
  9841 gaatttatat gatgattcaa gagtctgaat gggacataga atcgcaaaag ctgtttatca
  9901 aagcttgtca tgaagcatta aaggtaatat acgccaaaat ttattcccga accaaggaaa
  9961 atgaatatgc tcaaattgaa cgagaaaata cgaaaattat atctcaacta ggacgctgta
10021 ctaatgctga aaattttaga aaatttattg cggaattctg gggcaaagca gggcaacttt
10081 caattttaga agaacactgg gaagaattac taccaataac aacaggtgtt aggcattgga
10141 aaatgtccag ggatttaact tttattgcaa tcgctagcta tcccaaaagt aagaacatca
10201 agcctgaatc atcagaaata tctcagacaa gtagtgaata attagaattt tttctatttt
10261 cttaaatcca tgattttaaa tttttaggta aatactcaat gtctcatctg tttggtaata
10321 ttttaactat ttatggtact gctgctaata atcgaggtga aaatgaaggt aatattacta
10381 ccctacaaaa aataaactgg aagggcgaag ttcacaccag tgtctcagca gaggctattc
10441 gttgggcagt gcgctactac tggcaaaata atggttatga agtaaatcga cgttgggatg
10501 aaaatgcaca accactggct gatcatatct ggcaagacac gaacttcaat agtgttcggt
10561 tcattgatga tgatgtttta ggattcatgc aggcagaggc agcaagagtt gaagcaggtg
10621 agcaatctgg aggtgaagtc caggaagcat ccgcaggaga aattcaaaat gtgtctcaag
10681 atgaagagac agcaagccca aaaggcaagg gaaaaaaaac ttcgcaacgc aaaggacgag
10741 aaagatcaca agggagagtt accgctaaaa gaggtgtact agaggttact cgtgcagtat
10801 cattgattcc ctatgggggt aacattactt ttaatgcagt cagtggaaca aaaggacgaa
10861 cttctcttta tggtacagaa gttcatgcta ctcgttatca gtatggtttt gcaatgacac
10921 ccaatagtct ccaagacaaa tctcggatca atgcagttct agatggctta atttcaattg
10981 gagaagtagg aggaaatcat gcccggtttt tatatgattt ttccccagat agtattatat
11041 tacgctggac acatgatttc tctcctcggt ttctctattg ctttgaacaa gatgaatggg
11101 gaactatatc agttccagat ttagtcagac gggtagaagc tgaagatatt gacccaaaag
11161 aattatggat tggaggagca attgctagag atttaggaaa tttgggtgca aatgtgtttc
11221 caggtgtgaa gaaagtagta gaagaattat taaaggtcat tacacgagac ttacaattgc
11281 caccaaggag ttcataatgt gacgactatt gctttgaaag tagaagtccc tatcgcttgt
11341 tttcgccagt ctcgtgctag ggagtatgta gaaacctatt cggtaccacc accatcaaca
11401 gtatatggaa tgttactgtc tcttgtaggg gaagaaaaca gatatactca ctgtggagtc
11461 aagctggcga tcacacttgt atctgaacca gcaaaatcaa ctgtaattcg tacctttcat
11521 cgattgaaaa cgaagaatat tcatgatcct aaaaataata aacctgatta ccaggagtta
11581 ctgactaata ttgagtttgt agtttgggta gaccctgggg tagataaagc tagaccaaat
11641 ttagtgcaac gtttagaaga ggcatttact aacccagctt ctattaatag atttggtgga
11701 ctatgtttag gtgaaagtcg ggatttagta aatgatatta ccctcttacc aaaaaactac
11761 tatgcagaat caatgcggtg gttaatcaag gatgaacacg ggttgctaac tttaccttat
11821 tgggtagacc acgtaggttc gcaaggaacg cgatggctgc gttacgagct tcaggaatgc
11881 caagtattgc aaccgcctga attatcttgg acttcagttc aaagtgatta gggggttatt
11941 attttatttt gcaagtacct ttgcttgaga agtctaaata ccatgagcaa tagccttgtc
12001 ttcttatttg acaagccttt tagggatttt atacgcatcc aagatgcttg cgatttcctg
12061 gaacaccgtc aacacaagag ttgagggctt taacaacttt ccttgtgcta tgaatagcta
12121 ttaatttttg caactggact aatcttcagt gatagatgct tgtaaaattg aactagagct
12181 taggcgagtc aacaagtttg gcgatcgccg tgcttcaaca ttagatgcca ttaggcgttg
12241 agcaggcatc gtgcggggtg agaattgggt ttacgaaaat gtgcttcaac attagatgcc
12301 attaggcgtt gagcaggtag ttagtaataa ttaattcttt gccctttttt acttgtgctt
12361 caacattaga tgccattagg cgttgagcag agtctagata ttgcaacatt aacattctga
12421 gggttctgtg cttcaacatt agatgccatt aggcgttgag caggaagatt ttaattatcg
12481 ccatgtcggg gaaatagaag tgcttcaaca ttatcagatg ctgttaggtg ttgagcaaaa
12541 aaataggctc aagtatttgc gcttaatata aatacgttct cactgagtac aaaactagtc
12601 atcttgagtc tcgtctttcc gagaaatttt agcgataatt ttttcccatt cctcaatttg
12661 cttctgtatt tgtaatttgc gatcgctcaa ctctttatta tcattaacag acaaatcctg
12721 accactcaat cgctcacggt aaagagcaat cagttcggtt agggcttttt tattgcgtgc
12781 ttatcctcct gagtcagaga actcacattg actggaatca gctttctgcc tattctctcc
12841 acaaattcag accgacttaa atccatgctg tcggcgatcg catctaatcc atcaatcccg
12901 gtaggagtta gggctaggtt aactcgtttc ttcacctcat cgtacagttc tggtacgtct
12961 ttttgacctt tttgcccttt cttacccatt gccgtctact ttttacattc ctcccaatca
13021 tagtaaacac attcaacact ttaagctaaa cattaaaact gtttctaatc tttaggtatt
13081 gtgtaatgcc taatttagct agataattta ggtattgtgt aatgcctgaa taggcatctt
13141 gtaggaatat gagtaactaa tttcaccgtt tggcttatca acatctaaac ggcttaattt
13201 tcatgggcaa tccttaattg ctgcttatct aattcaaatt aataaaaatc tgctaaataa
13261 ttcggtcatt tttcacaact atatggtgag ttttttccct aaaccttatc cagaggaaat
13321 tttatatagt gtcattgctc gttatcacat tagaagtggc aataccagtc caaaaattac
13381 acttcaagag ttatttaatt cacaaactac tgtagcaaca gtagatttac catcgaacct
13441 gaataattta attcaaaatc tacaatttat ttcaaattac caagttgagg atttgatata
13501 taaacatact ctctaccctt tatatagccc tttcttgtct gcaaacaggt ctagtcaggt
13561 tttggaatct atgaaaggag attacggagg agatattcat acaagagccg gaattatggc
13621 aagctcaatt actatgccaa agtattttcg gttttgtcca acttgcctag aagaagacct
13681 aaaaacttat ggcgaacctt actggcatcg catccatcaa ataccagggg ttttagtttg
13741 tccatttcat gctgaagttt tgcaaaatag tctagttccc ttacacggtt ttaataagca
13801 tgaatatcat gcagctagta cagacaactg ttctattact aaagaatcaa ctttttttag
13861 cactgacata ctgaaaaaac tactgttatt agccaaagac ttttggtggt tactcaatag
13921 tgaaatacct tgccaagaac cacagtggtt tcgcaaacaa tataccaatc tgatgattga
13981 gcagcgtctt gcaactgcaa caggtcgaat ttatcagaaa agactactgg ataatttttt
14041 gtttttttat ggtcgagaaa tgctcagtgc cgttgattca atggtaaatc ataatgactc
14101 aaacaattgg gttactagca ttgtcaggaa gcataggaaa tctttccatc ctcttaggca
14161 tttactgata atcagttttt tgaaaacgtc agtagaggaa tttttcaagc aagatactga
14221 atacaagcct tttgggaat ctccttggtt gtgtctcaat gctgccgcag aacattatct
14281 acaaccagtg attaccagtt tagacattac tttatgctgc gatacaaaaa agcctgtcgg
14341 tactttttct tgttcttgtg gaatgattta ttgccggact gggcctgatg aaacagatga
14401 agacaaactt cgcattggta aaattaaaac atttggtcaa ctatgggagc aaaagctgaa
14461 agagttagta gaagttgaaa agttgggttt gcgggagaca gccagaagat taaatgttga
14521 tgctagaact atcaaacgtt atgtatctcg tctgagactg acaacttatt ggcagactag
14581 aaaggaaaat gactctgtag gcttacagga attaccagaa atagatccca attttgcaac
14641 tgaactcaaa ttgaaacaca ggcaaaattg gatggtttta caagtacaga accctgaagc
14701 ttcaaagaca actctgagaa aactagcacc agccacctat atttggctat acaggaatga
14761 cagagaatgg ctcaatcaaa actcacccgc tttacaagtt gctgttcctt ccgttgtgag
14821 agttgattgg catgagcgag atcagcaaat tctcactcag gttcaagatg cagtgcgatc
14881 gctacttaac gctgagatac cagagaaaat ttctattagt agggtaggga aaactatcgg
14941 cttacttgca ttactcgaaa aacatctcga ccaaatgcct ctaacaaagg cttacttaga
15001 atcagtagtt gaaacggtag aagaatttca aatgcgccgg atcaagtggg caatcaagtt
15061 gcttgatgaa tgtggagaag aaattatgcg ctggaaggta gtcagagttg ctgctttgcg
15121 agaggattgc tctgaaaggg tcagtgcatt tctggaaagt gaacttgaga aagcatacaa
15181 gaaagagagg tgattcaatt cacctctcca agtgatggga taaatgcttt gtgtgttagg
15241 ccgcgtcggc taccagtaag ccattcatag cgatgatgat gatttgtgct gctaaaggag
15301 tatcacaacg tggtctatcg tcgctattac agggttgtgc tacccattta ccctccagat
15361 tttggtagaa agtgccgaga agttgataac cattccaaac acggtaaagc tccccaaata
15421 cttcagatac cgaatcaatc tcaatttctg gtgctactgg gtcagcaagc tggtcaatat
15481 attcctcaaa ctctaattga gctaaggctt ggttatcaaa ttcatcttgt acaatcatca
15541 tgagtaacct cattaatggg gttgaacaaa aagcgatcgc atttctcttg gcggagggcg
15601 atcgcctttt tgatatcatc ccacaatatg gctactttag tagctaaata ataacaaatg
15661 tatctaaagc tttaatttgt cacttcgact gtgcttaaaa aattgcttac cgatatttcc
15721 aatgcagtac atatagcttc taatactttt agggaaacac tttcagactc accatattct
15781 aattttttca agttttgatg ggaacattca ccacctctag cagcaatttc atcagctagt
15841 ttctgacgtg attttttacc acgcaatcgc tttaaaatga ttcctctgtc ttgattccag
15901 acgacagata caacatctgc aacataaata tacgtttttg tttctttttc acccttattg
15961 cccatatagt agctacaaca gtaaacaata cataaatttt gagctactat agtttacaaa
16021 ttattaggat ttaggtatct caaaacgaag ttgcgcccgg tcttcaggat gagagcgtta
16081 tcatccaaga agatacacaa tgcaggtttt gctaagagaa tgtgtcatag ccaatattat
16141 gagtaatcgc ggattcctta aagaggtagc aaacaaatat atattaggct gattatgtta
16201 atttgctaaa aatgttcagt tcttaaaaat aactgaacgt ttttatctaa gtataagtac
16261 gagcttattt tattagtaga ttattaaatt aataaattaa taaattaaat aattacttgg
16321 gctatgacac cgtataaaca cggttttaaa atcaaaataa ggatttaaag aagaaatatc
16381 tataaaagta tttgcggcaa aatgtggcgg ttaagagtat atgcaaatac aataacttga
16441 atatgttttc ctactattat ttgtcataag tgtatccttt atggcgcaaa ccatagtaat
16501 acccacgggc attcctatca taacccttcg cctccaggta cttgtattgg ctttggggga
16561 agtttcaaca tggtggcgaa ctcaatattt ttctgctgct ggactgagat ttttagaaag
16621 aatctaccca cgtacagctt ttgccgcagc tatcaatgct gctagtacgg cagctcgtcc
16681 tgttcacgac gctagtactg gcagtaacca aatctaccat ctgtttcgcc ttcctatttc
16741 catagagcgg gaagttcaac tattactaac aaaggcacaa ggagcaagtt tggcgttaga
16801 agtcaaacca gcacttgggg ataaagacaa gttgatgaca atgttagatg cactaactac
16861 agaaaaatct aaggtagcgg ttggtgcatt acgtttagga agcagtgcag aggcatacca
16921 actagcaacc tacaaacgga tggcaggagc atatctaaga ggttttcaaa caggcgatcg
16981 cgtctttccc tacatggagg cagaccagga gtgattgtta tgacatcggg tgacgcagtg
17041 caaaagtcac ctcgttacag tattgcgatt gtctgtaagg gaactgcaat ggtgaacgag
17101 actcgccatt taattcaaca gtggcatcct acagaaaatg tggatacatt tgttaaacgc
17161 gttcaagctg aggatctgct gggacgacaa acagcccagc gagcaaagga cattgcccga
17221 aaagtctttg cagcacgctt tttgctacca aacaacaaac ctgctcgact ccttaaacaa
17281 attgttgagg ctggtcttcc ccataaaact tttgtagaaa tactattttt atttgcgtgt
17341 cgtgctgata atttattgta tgattttacg ctaaatattt actgggcagc agtagcacaa
17401 agacgaaaga aaattttcac tcaagacgtt ttagacttct tcgagtcagc tgctgttgat
17461 ggacgaattc tctctccttg gtctgaggga acgcaggtgc ggacagctag gggattgtta
17521 gcgacgttgc gtgatgttgg ttttttacgc gatgttagtc atggtaaatc ggagcgagag
17581 attattccct actacatatc tgatgaaggt gtagcttgcc ttgcacgcta tctccatgaa
17641 tcaggaattt ctaactcagc tttgtgtgaa caccaagact ggaatatttt tggtctcaac
17701 cgtgaacaag tgtgcgatcg cctagatcaa cttggagaac accgtggatt aatcatacaa
17761 aaagctgggt cagtagtcag catcacttgg aaggtcaact ctatggagga acttattaat
17821 gtcctctctc gatgaaactt ttgaattact tttacaaaag ctagaccgcc cagacaccct
17881 caatgctgct aaaagtgacc caatttttta cttcgtttac aaacccgaag atatgctcac
17941 cctaaagcag cgtttatcgc tttggaaagc taaattaagg gagttgaaat ttgatgttga
18001 aagaatatcg ctctccgacc ttttgtggca gattattgac gaatcagggc ggtgggaaga
18061 ctggctagaa attgaacctt cagcagaggt tgaggagtta aatcaagcca ttcgtgatgt
18121 tttaactagt cagagtcgtc taattgaaga ggtggcacaa cgaattaatt ctttgatgcc
18181 tcccaaaatt gtttttttaa ctgaagtcga gatgctgcat ccttatctac gctctcggac
18241 tctagaaaac aagcttcatg atcgcgtgcc agtaccattg ataatttttt atccaggtta
18301 tcgggcggga cagtacggtc tacgcttttt aggtttccac gcagaagaca gtaactatcg
18361 ctcgataatc gtcggaggca tttgatggca acaattcaat ctcttttttc cagcagtaga
18421 cctattgacc gacagattga aaaggtcatc gattattctg cacaggatga agacagacta
18481 gctacagaaa tttcagaata tgagattacc gataatattg agcgatgtta tcggaggttt
18541 ctggatgtat tttcggaagg agttcgtggt ggacgcgtaa ctgagactgg aatatgggtg
18601 tctgggttct atggttctgg caagagttct tttacaaaat atttgggatt tgcattagaa
18661 ggagagagaa aaaaagtacg tggcaagcca tttctggaac ttttatctga gcgctttgtt
18721 aatcgcaata ctatccaagc cgaactacta actctagtta gacaacattc cactgttgtc
18781 attttccttg atttaggttc tgaacaactt tctgaaagtg ctgccacgac tgtttccaca
18841 gtcctttatt ggaaagtatt gcagtgggca ggtttttcta aagaaaagaa actagcacaa
18901 ctggagttaa ctttagaacg tcaaggaaaa tatgctgaat ttcagcagct atatcgagat
18961 acgtataaca aagaatggga agaaattcac aatgatccct tactaggggt tagtcgcgct
19021 gcggaaattg tcactcaagt attacctaaa gaatttccta caagtaaaaa ctttcgagaa
19081 ttgagatttg atctggctga taatttgcgc gatcgcacca gtgaaattat tgatttagtg
19141 cgacagcgaa ccaaatgtga aaatatctta tttttactcg atgaagcggg tcaatacgtt
19201 gctcctcgtg gggaattgat tcttaactta gatggaatgg ctcgtaattt caaagagtta
19261 ggtgaaggaa aagtctggat aattgccaca ggtcagcaaa ccctgaatga aattgtcgaa
19321 aaagctgcct ataactctgc tgaactgaac aagctgaaag acagattccc aatctctatt
19381 caccttgatg ctagcgacat tagagaaatt acttatcggc gattattgac aaagccgcct
19441 gataaagaac aattattaaa agatttattt gctacccacg gtcaagcggt tttaacacac
19501 acacgactaa ctgaaacagt actttataag aatgatccga acgctaccac ctttgctcaa
19561 ctttatccct tcctgcccca gcactttgat ttgctgctgg agttgattcg caccctggct
19621 cggtcaacag ggggtgttgg cttacgttca gccattcgtg tgattcaaga tgttctcatt
19681 gacaaaagcc gtgttttgcc agcaaacact cttaaattag cagaacgtcc tataggtgtt
19741 ttggcttgtg tggatgactt ctacaacact ttgcgcgaag acatcaacaa agtatatcct
19801 cacgttgtga gtggggcaga taaagttgtc agaatttttc ctaatgatga gatcgcccat
19861 agggtagcta aagctgtagc tgctttacag ccgattgata cctttccgcg cacagcagaa
19921 aatattgctg ctcttcttta cccagaattg ggttcgcttt ctttattcga tgaggttcaa
19981 caagcactca agagaatttt aaatgagaag gagtgcggtt taattgaaga ccctcaagca
20041 ggtggttatg tttttctcag tgaatctgtt agacctttgc gagataagcg aacttcctac
20101 atccctacgt ctaacgaatg ctctcgcatt aaagaagata ttgttaagca aatttttcgg
20161 gatcaaccat ccacaagact tgacaatatt aaggaagtaa aagccattgt caaactagag
20221 cataagctag tcgttggtcg ggatgaaacc atcgatttca aattagaatt cgttgatgct
20281 ggcggattct ccaatcgccg tactgaattg atggcagaaa caaacagtcg gcgagaattg
20341 aaaaactcta ttgtttggtt ggcaaaatca gacaacacag tagatgaact actgcaagaa
20401 attgctcgtt ctgagtgggt agttagagaa attgatgagc gagcagatga taaaggagat
20461 gtggcacagt ttttgcgagc agagcggcgt tcaggcgatc gcaaccgaga cgaagtagcg
20521 aaaaaaattg agcgcttgct gatggaagga actttgattt tccgaggaaa acctacacca
20581 gttagtgagg caggacagac tctaaacgct ggagcgcaga cggttctcgc aaatgcagca
20641 aaagaagtgt ttcatctaca caatctcgca gctattcgac cagcaacgga tgttgctgct
20701 aagtttttgg gcgtagagcg tttagatcgc attacagagc aacttgatcc tttgcgttta
20761 gtgactaaaa aagctagcaa tactcgtgtt aatgtcaacc attcagcttt ggcggaagtg
20821 ctgcgagtgt tccgggcaaa agtagatgag tctggttcag gtcgcttgca aggaaatttc
20881 ctacaagatt ttttctcggc agatccttat ggctggacta aggatacagt ccgttactta
20941 tttgctgcac tattgacagc tggtgaaatt gaattacatt accccaaagc tgatggccca
21001 ctgcggacac cggggccttt agccgtggag gcaatgaaaa atactatgga atttagccgg
21061 gtgggagttt cattgcggga tagcaaacct tccattgaag ctttggagcg ggctgcacag
21121 cgtttagaag agctttttgc tgtggaagtt gtaccgttgg aagacaatat cagccgtgca
21181 gtacaaaaac agatgccaga gttattagaa caaattgcag acttacctgt tcgtctacgt
21241 cttttggatc tgcggggaga acaaaaggca aaagaactgc aagcaagttt aacggatatc
21301 ctcagaggcg atgctagcaa tgcaacagca cttttaggta gtcaaaattg cacaattcct
21361 gacgatatcc aatgggcaaa gcaaattgtt aatttactca acaatggcgc tgaaagagaa
21421 ttcaaagtag cacgatcgtt actcaataac ttagatgaac ttaaggattt attttccaag
21481 caggtgctag aactgtcatc tcaaggtaat cgagaagcta tttacaatgt ttttcactca
21541 gaacggtttc aagaacatct accagagttg cggcgagcag ttcgagaatt gacggggcaa
21601 ttagaagaac gctacacaac tgaggttgca gagtataaac aagacttaca aaaagcctta
21661 aacggcttgg agctagagcc agaatggtta aaactaactg acgagcagcg aaataatatt
21721 gccgatcgct tgcagatgga tgttgccgaa caaattgacg gacagaatcc agtgcgatcg
21781 ctccaggtga ttctcacccg ccgtttaggt ctaactggag tagttgataa tttacggcgg
21841 cagatacaac aatcagtgcc acatgaggcg gaatcaacaa atgggctagc aggtacttac
21901 tctgtagaaa atctacatga aacagaaaga gtgaatacac ctactggtga atacactgta
21961 gaaacagcaa ttgatgcagc cgaatttgtc atgccagtac ttatagaaaa ttctgagcaa
22021 ctggatactt ggttagcttc cataagagga aaactactag aaattttgaa tttacgtaag
22081 cgtatacgca ttaagggata aatatgagct ttgatcgaga aaccctcaac gccttagcta
22141 gaatggttgc agcgtgtagg cggcgactga cggaagatgt agaaaatcaa ctccagcaga
22201 ctttcgggtt gtatgtagat ggcacaattc ttcccttatc ccaattgacc catctgacag
22261 aggagcaaaa ggttgcagcg caagcattac gtgaactgct aaaccacttc aaagccagcg
22321 acccacaaaa aagctatcaa tctgcttaca atcgcacaat tctggaaatc tcctttacca
22381 tcctcaaccg tttggcagct ttgcgcttgt gtgaggagcg gaatttagta attgaatgcg
22441 tccgcaaagg aatggagtct gacgggtttc gcttgtttga aagacttgcc aatggcagtt
22501 tggggagtcg ttacgaaacc tatcgggtgt ttgtggagtc catgtttgac gagttggcgg
22561 tggatttggg agtactattt gaccgcacta ctccacagtc aacgattttt ccgagcgatc
22621 gcgtcttaac agaagtcttc gatttgctca atgatgtcac actgcaactt gtctggactg
22681 aagatgaaac aataggctgg atttaccaat acttcaatcc acctgaagaa cggcgagcaa
22741 tgcgggaagc gtcccaagca ccccgcaata gtcgggaatt agctgttcgc aaccagtttt
22801 ttactccacg ttatgttgtt gagtttctta cagaaaatac ccttggtcgc ctctggtatg
22861 agatgcgtca aggagaaact cgaatcaaag atgaatgcca gtattttgtc gaaaattctg
22921 agcaattctt agccagggat cgtaaagacc cccgtgatat caaagggcta gatccggcaa
22981 gcggtagcgg tcattttctc ctttacgctt atgacttatt tgaggtgatt tatcaggaag
23041 catgggaaga tgaaaattcc ccgccctcag aatttacggg tcgaaagttg cgagaagatt
23101 acccaacttt agaagagttg cacagacagt tacctgtatt aattcttaag tacaatttgc
23161 atggtattga cattgatgcc cgtgcttgtc aaattgccgc tcttgctttg tggctacgcg
23221 ctcaacgtta ttaccaatcg ctaaatatta aactaagtga acgtccaccc atacaaaaaa
23281 ttaatattat ctgcgctgaa cccatgcctg gggaagaaga attactcgca gaatttatcg
23341 atgagttgaa tcagaaacgt ccaccaatta ttggtgaatt ggtaagaaaa gtttttgaaa
23401 agatgaattt agccggagaa actggagcat tacttaaaat tgaagaagaa attagagatg
23461 agattacaca agctaaaaca caatggctag ctgaatataa cccagagcaa ccaactctat
23521 tttcattagg agaatattca gatgttaacc aattaagttt atttaagttc gccggaatta
23581 ccgatgagca gttctggact caagttgaag actgggttat agaagagctt cagaactatg
23641 ctaatcgagc aacgacaggg caagttttcc agcgtcagct attttctgac gatgcgctac
23701 agggatttgc ctttgtggat atctgccgta agcagttcga ttttatatta atgaatcccc
23761 catttggtga ggtaagtatt ccttcaaaag aatatattga agaagtttat gaagatacca
23821 agggtaatgt ttatcaaacc tttgttgaat gtttccaaga caggctagta gcaggaggat
23881 tcttaggggt tatttctagc agaacaggct ttttcttggc gcaatcaagc gattggcgta
23941 aaagaatatt actgcgtttg tatcgtccgt tattgttagc cgatttaggt tatggtgttt
24001 tggaagcgat ggtggaaaca gcagcctatg ttctacgtag tattacaata gaagaagata
24061 aaaacttaac attaaatctt gttccacaac tattagaaat tcctgtagat agacagagat
24121 gttttagcat tcccaaatat cagaaacatc gaggcggctt aaagcggcat caggctaatc
24181 aagaattaaa aaaactgcac gaaaatggtt atatatcatt gacactaggt cgttttattc
24241 gctataaagc taattttgca aaaattcaac agtctgatat tcctagttat ttagcatatc
24301 ctaatttaat ttgttttcga ctgttggagg aaggagataa aaaaagtgcc ttaatagata
24361 ttttacaaaa ttacaatgac tctagatatt ttgtagtttc gccagaaagt ttttcaatgg
24421 ttcctaatac accattttgt tattgggtaa gtaataatat tcgccagtta tttactaaac
24481 tgccgcaatt tgaaagtaat ggtagaatcg ctcaacacgg agcatcaaca aaaaaagatc
24541 cacgatttct acgtctttgg tgggaaatac tacctaataa aatagtaact ggtacggtag
24601 aaacaacacc agaacagttt tgtcaacaaa cttttgagga taagccttgg gtcttatttg
24661 ctaaaggtgg agcttattct ccatattatg cagacttaca tttgctaata aattggaaga
24721 ataatggcga ggaaattgaa caatatgttt tatacaaata tccatatcta ggcagaagtg
24781 gtgcagattg gattctacat agggagtgta attatttcca agcaggctta acatggacta
24841 ctcggactac tagcaagatt agttttcgga atttgcctgc gggtagcata tttagtagta
24901 aaggagcagc agcttttact aaccatgaaa tgtattggtt ggctatttta caatcgtcta
24961 tctctgaagc tttaattagt ttgcagcttg cagcagtaga tgcagcagcc cgctcttatg
25021 aagtaggttt aattcaacgt acacctgttc ctcctaatag ttctgatttc cataaggaaa
25081 tattagtaaa attagcagat ttttgtattg gtattaaacg ctctttagat acagtaaatg
25141 aacatagcca catatttcat atacctgctc tgcttcaagc attaggtaat aacttaactg
25201 ataagatttt taattgggaa gataatatta ataaatccac taaacgatta agtaagtatc
25261 aagaacaaat tgatgatgtc gtcttccaac tttacggaat atcaaaaaca gagaagaaaa
25321 gtcttgaaat aaatattaaa aacaaaaata taagaattga agataatact gaagatatag
25381 acgaagaaga tgaaactgca ctagcagcag acgcaaaaca gctagttact gatttacttt
25441 cttatacact cggttgctct tttggtcgtt gggatatccg cttttctaca ggcgataaat
25501 cagcaccaga acttcccgac ccctttgcac cattaccagc ctgttcaccg ggaatgctta
25561 ttggtactga tggtttacca gtttcagaaa ctccgccagg atatcccatt cccattgctt
25621 gggatggcat tttagtagat gaccccaatc accccaacga catcacccgt cgtgtccgtg
25681 aagttttaga aattatatgg aagaacaacg ccaataaaat tgaacaggaa gcttgcgaaa
25741 ttcttagtgt gtgtgaactg cgggattact tccaacgtcc tacaaacttc tttcaaaaac
25801 atctcaaatg ctataccaaa agtaaacgca aagcaccaat ttactggtca ctttctacaa
25861 catctagttc ttacacagtc tggatttatt accaccgcct tacagaccaa acgctctaca
25921 caatcgtcaa ccgctacctt gaaccaaaaa ttgccgaggt tgagcgtatc actggtggct
25981 tagaaaaaga attagagaca aaatcgggac gggaagcttc acaagtacgc gataacttac
26041 acgcaacacg caaattcctc agtgaattgc aagatatgaa gcaggaactt ttgcgcgtcg
26101 cacagctacc ttacaaaccc aatctcaatg atggcgcaat tatcactgcc gcccctctac
26161 accgtttatt tgctttgcga cagtgggcgc aagaaaccaa gaaatgttgg gaaagtttgg
26221 aaaaaggcga atacgattgg gcgcatttag cctacacaat ttggacagac agagtgcggg
26281 aagtctgcaa aagggataaa tcaattgcga tcgcccacgg acttgaagaa gtttaccaag
26341 cagctaaccc agaaaattcc caacccaaaa caaccaaagg cagaagccgt aaaaagacga
26401 cacaggagtc agtataatga gcgtctcaga ctttgtttgc cgacaattac accaaagatt
26461 agaacagcac cgtattgtcg tttggtacga tggcaatcgc gcttttgctg attttattca
26521 atccttccaa gctgactcct gtgtagtcgt atctgctgtt gagtctattt tgaactcccg
26581 tcgtcaagcc gaagccgtct accgccagat gaacgagtct aataactcag ccaaagctgg
26641 gttgaatctc ctcatttacg taccccgcca gcgcggaaca atagaagatg agaagcggca
26701 agatccgttt gaagttttcg catgggctgg tgtggcgttt ggcgacaaag aagcagaaca
26761 gttagaatct cttgctagac aagcaatgcc agaacgggct atagaaatta ctcggctatt
26821 tgcccaaggc agtccaacgc tatcgatgtt ggataaatta cagttccatc accgttcgcc
26881 tttactgtta gaggcgctag gtactgactc accatcagaa gcgatagcct tagtcctctg
26941 cttagaggag aaatcacaac gaattgattc tgttaaaggt tgtttaaaag aatttttgcc
27001 gttattggca acggagattg gttttaaacc tgcatccaaa gctaaatcat ggacagaaat
27061 tagaaagcaa ctcattcagt atgtgctgtt tagcgaattt gccctcgacc tgccttgtga
27121 cctgccagag tcattaagta ccttacccag agccaaagcc agccatgaat tagtgatttt
27181 tgcagtgtgc gatcgcatga gggatagttc cgacttgcga tcgggctatg ttcagctagc
27241 agtagaagta gaaaaccagt tgcaccttgg caatctcaca gaaaatatag ctcaactagg
27301 tactagagat accttcccct ttgcagaaaa gcgataccta cagcaagtgc tggagtatgt
27361 gcaacagaat aacttagcag atgcccagaa gattttaacc caacgccgtc attccatctg
27421 gaacaaccac ttggaacgag gtaatatttg gatgatagta gagcgttgtg tgacatttct
27481 cgccacaagt aatgctgtag aagagttgtc aaaaaaatct ttacagtcaa tgtctttacg
27541 ccaaatcatc tctgcatacg cacctccaga tcgctgggga tgggcagaac tagaccgaca
27601 tcagcgacta tttgaacagg gtgcaaccgc ctatgcagga gatgagggag agatagaatc
27661 tttagtcgaa ttttgccgcc gacgttactt agaagtggca ttagcaattc aagactgctt
27721 ccttaaatgt gttcagaaag aaggttggtt tcccgaagga gtgctgcgat aaacccaaat
27781 atttgaccag tatgtagctc ctctactgga acagaacaac aaaaaagtcg cattttttct
27841 agttgattcc ctgcgcttcg agatgggacg agatttggca gaagctttag aacagttggg
27901 cgaagtcgag attttaccag tcgcatctgt tttacctaca actacacctt gcgggatggc
27961 agcactgatg cctaatgctg atggtacgct cagactggtg gaatcaggcg gagagctaat
28021 tcctgtctta ggtgaaagga aactggaaga gtccaagcac cggatgcgac tgctacagga
28081 aaaatacggc gatcgcttca aagatatcga accggaagat attttcagca aaaaggtaaa
28141 tgccttgggt aagcagttag cctctgtgga tttattagtt gtccgcacca aagaccctga
28201 ccgcattgct gaaagtattg gcaacatgaa agcccgaaaa tatctttcgg atatagtcgc
28261 tgaaatggta aatacaattc gtcgattatc tacaattggg ttcacccatt ttgtcattag
28321 tgcagatcat ggtcacgtcc taattgacga aataccatta ggagatgtaa ttcccaaacc
28381 agggggtgag tggttgaaaa ctaagcgcag gagtttgctt gggcaattta tatcgggcga
28441 atcttcaagt gtagttatct tcaaaactga gcaggttggt atccaaggcg atgcccaaga
28501 cctctgtgtt gctaaaggct ttaaagtttt ccaacaagtt gaaggttact tccacgaagg
28561 cataagcttg caggaagcga tcgtgccatt ggtaattttg cgatcgcaag gtaagattac
28621 tgctcagagt aagccaaata ttttcctgcg ttataagtac gattacttta ccaataaagt
28681 cattaatctg cgagtctgct atgaatattt gctaccagaa gcaatacaag tccgcattga
28741 agcttacgat ggctcaacag caaaagccaa gcgggtaggt aaagcaaccg actgtgatgc
28801 tagagacgaa cgaactggtg aaatcatact ccagcccaat caagaaactt cggttcctat
28861 cttactggag tctgacgaca tttcatgctc caaaattgaa atacgagtaa ttgacccaca
28921 aactggcgta atttgggcaa agttagaact ggaaaatcgc ttactagatt aagaatgaac
28981 tcatgtttca agatgcctta gaccaaaaag ttaatcaaac atttccagga aaggtagtac
29041 gtaaggactt gctacatcaa atcaagggtg gagaaaatgt accatcttat gtactggaat
29101 atcttctggg aaagtactgc gcctcagatg atgaagatga aatccgcatt ggtattcagg
29161 ctgtcaaaga aacactacaa agcaactact tccgccacga tgaagctaac aaagcccaag
29221 cgctagtaga acaacgggga cgacatcgat ttatagaccg tatagaagtt cgttatctcg
29281 ccagtgaaaa caaatattgg gcggcaatgg atcactttag ttactccaga attcatgttg
29341 ctgaccgatt ttatcgacaa tacgaacgac ttttagaagg tggaatttgg ggtcttgtag
29401 atgttgaatt tcaaccaact gaagaagaag gtgctaaagc cagtcccttt cacattgctg
29461 acttaagacc aattcagtta gcaagattta acgttgatga atatgcagaa ggtcgtcgca
29521 gcttcagccg cgatcaatgg attgatattt tgctgcggag tgtgggttta gaacctaccc
29581 aaatagaaca acgtttaaaa ctgctgttac tgactcggtt cattcccttt gtcgaaaaaa
29641 attataactt cattgagcta gggccacgag gaacaggtaa atcctatgcc tacagtgaga
29701 tgtcgcctta cagcatcctc atttctggtg gtaaagccag cactgcaaac cttttctaca
29761 acaatgcccg ccgtcaggta ggtttagtag gtcattggga tgttgttgct tttgatgaag
29821 tcggtggttt gaaagttacc gatgcggatg caattcagat tatgaaagat tacatggcta
29881 acggtcgttt cagtcgtgga atcacccaag ttttagctga cgcgtctttg gtatttgttg
29941 gtaatcttaa ccaacctgtt gaaactctag tccaaaatac tgcaacagac ttatttcagc
30001 cattaccaaa agaatttgat ctggctttac ttgaccggat gcacttctac ttgccaggat
30061 gggaagtgcc aaaaaactcc aaaaatctgc ttacagaaca ctatggtttt gtcactgatt
30121 atttggctga agcgtttcgt accctaagaa aacaaaatcg gtttgatgaa gtcgagaaag
30181 tcttccgttt tggttctcat gtagaaggac gagatgcgat cgctgtcaaa aaaaccgtta
30241 gcggattact taagattatc catccagacg gagaatggac aaaggaaaac ctgacagaat
30301 atgtagaact agccttagaa gggcgcagac gagttaaaga acaactcaaa aagcgaggtt
30361 ctttcgagtt ttataaaacc agtttttctt acatcgacca ggaaaccgaa gcagagatga
30421 cagtgggtgt accagaacaa ggtagtgctg gaattatctc tcaagaaccc ttacccccag
30481 gcacagtgta caccgccaca gcagatggag aagcaagggt tggtcttttc cgcttggaag
30541 tagcttgtac atcggggaca ggaaaattgc gaacccctac aggacttgac aaagctttga
30601 aagaatcatt aaaccgcgct tacagctatc ttcaaagtat aaaggaaaga aaaggactca
30661 atgaaacttt gggattgaaa gatatttacg ctgaagctgt ggacttgtct ggaagtcgtg
30721 ttgaatgtcc ttgtggtgta gcattttttg tcgccatcat ttcagccata cagaatcgtc
30781 aaatccaagc tggaactctt atcttgggcg atttaacgat tcaagggaat atcaaaggcc
30841 ctgcttcaat tgttgaatca ttacaaatag caatggaaag tggagcttta cgagctttag
30901 taccactttc taataaaagc cagtttgcag gtttaccaga agagatagtc gaaaagctgg
30961 atattgtgtt ttacggtgat gttgaccgag cagtaattaa gagcgtcgaa atttaagaga
31021 ctatccctat tatgtcactc tcgaaaaaca ataattgaaa caagattcta aacctttgat
31081 ttaattaagc ttcagccttt attttctaac aataactaaa tttatagcca aaatcagaaa
31141 attaaagccc tgaaagcttt ccagcgattc ggttctccta aaatgacaca acagggctat
31201 ttataaaata aatctttagg ctacaagacg acttagcata atcctacttt gagaaacctt
31261 taatgtagct gatgagatgt tgatctatat tgtcgatatc acctttaagc tactgaaaat
31321 cgagttctga acggttatga aatgcgattg ctcgtgacct tgtagatgca gttcaccgca
31381 attttgctat cgactggcca cagaaataac tttttaaaac taacctctgc cgattagcgt
31441 gtgaggtcga gaattttgtt gtgcgatcgc ctcactacga acaaatgcta acttttttac
31501 acccctttaa atttgcttgt ttctagtatc gctgtttcta cgattttttt gagattaata
31561 gcacctccaa ttacagtaga aatactgtga atttagcttt tattgacttg gtacttagct
31621 aaaatactat tcttctattg gagtattgag gagcgctcgc gcaataggaa aagcaagaca
31681 caatatttat ttataaaaag gaaataattc agcttaaagg tttcttaatg gaacctgacg
31741 ggaactttca atctttcatc aacgtgatta tagtaagctc aacagtaaat atacgattta
31801 tagttattta gttattgtta accttcaagc catctaagct aaattacgga tgattaaccc
31861 ccagctagac aaaactattg agcgttatga gacggaaatt gagagactga aagtgactga
31921 cacggccata gatgccgaac aagttttgga agtgttaagt gccagggatg ctgtgcagtt
31981 agccttaaag ggtgcaacat tcattcctag cagtaggcta aagcaggttc tagagttaga
32041 tgcagaactc aggaaacaag cagtacacat taacaaagtt atcaaagctg aacaattcgc
32101 ccagtggcga gaaagtacac atcctcctgc tgaagcttgg tggtggcggt tagaaaatct
32161 tacccctcac cataagtggg atagatttga ttggttgtgg aagggtctag tagttgctgg
32221 ctggactgct aacctcagtt tattaatcaa tattgctact cgctttttga gcgggggagc
32281 aggattattg ggagcttctg cggttatttt gccgagtatt ctggcattgc tacaggcaag
32341 tagtgaacta actcaagcag gtaaacaaga atttgacaaa ttactcacaa aactgaatat
32401 cccccagcac ttacacgaag aagctaagtt cggatcaact ttattaatga caatcttttt
32461 acttggtttt tggttggctc taccgtcaat ttcccaactc tacaaccgtc aaggactcag
32521 taattaccta cagggaaaat taggagcagc agaacaagac taccttaaag caatttcctt
32581 ggatgccgat aatgcagatg ctcattataa tcttggcaat ctttacgagg atttacaaga
32641 ttttgagaaa gcacggaagc attatcaaat cgcagtggga agtgacgttc ctgatgctta
32701 caataatcta gctcgcttat acatccagga taaaaaatat tcccaggcta gagctttgct
32761 acaaaatgga ctagtaaaag ctaaagacct tcccgaagtc agatacagcc tgtttaaaaa
32821 tttaggatgg gtaaggtttg agcaaggcag atatgaagaa gcacaactaa acttacaagc
32881 agcaattggt attgcaaata acccagaggt agcaaagaat atccaaaata ctggtgcggc
32941 gtattgtatc ttagcgcagg taatggagcg gcaaaaacaa ccggccgctt tggagcaatg
33001 gcagaagtgc tgtgaacaag gttctactct caatgctgat gaagacacat ggttgcatct
33061 agctcggcaa aaattacaaa aggcaggaag agtatgcaaa tagaccggaa aaagattagt
33121 ttcttagcca ttgtactaag cctacctttt atgacggtag caacacctgg gctgagtcaa
33181 cagaatagtc taaattttat ctccgaagtt aagggagatg tcaaaattca acgttctgga
33241 cgcaagaacc atcaaaaagc atatggtggt gaactactag attcttctga ttctttgcga
33301 ttgggaaaag gtgcttctac aaaagttgta tgtaataact tatccatttg gaatattaaa
33361 tctccaggga aattttcagt ctctagtggt tgtccatcca ctggaaaacc agttcttata
33421 agaaatggta gtgaacgcgc tccgactcgc gctcccaatg acccgacaat tccctacatc
33481 attagtccgc gtgatacagc aattttgagt ggcaaaccta ctctgcgttg gaatgctgtt
33541 aagggtgcaa ccagctataa ggtgacgtta cgcggccctg gtgttaattg gacaactaat
33601 gtgaagcagt cagaagttgt ttattctggt caagaacctc tacagccagg ttttcgttat
33661 cgggtagttg tgactgctga taatggagca acttctgaga gtgatgcacc tgttggattc
33721 aatttactga gtgaggggga ggctcaacag gtaaaagctg aaattacaca attacaaaag
33781 caaccgctaa ctgatgaatc taaaaatctt gctttggcat atttgtacca aagcaagaat
33841 ttaaatgctg tggcaattga tttattagca ggcttagtta agcaagaaaa ccaaagcaca
33901 gcagtttatc agcttttagg tagcctctac caacaggtag gtttacatcg attagctaaa
33961 gaacattact taactgcgct caagttagct aagacaaaca aaagtctgga agcgcaagca
34021 atcatccaaa ccagcttagg agaaattgat atagttcttg acaacttgca gcaggcgttt
34081 gagtcattgc aagctgctca aaataactat cgtgccttgg gagatgagca acaagtacag
34141 caactacagc agaaactaga tgacttgaaa ggaaggctac catcatgaat aacctgcgaa
34201 ctagacaatt agtaacccta acaattttgg tagcaacagc tggattatgg gtgttaatgc
34261 caaagcccac aattgggcaa tcaacccctc ctgtttctgc tgctcagtct gcggaattgg
34321 cggaagtaga aagactcaat caacaggtga ttcaacttta tgaaaaaggc aaatatagtg
34381 aagcaattcc cttagcagag cgtgcattgg ctatccgtaa gcaaaaacta ggcgatgagc
34441 atccggatgt ggcaagnnnn nnnnnnnnnn nnnnnnnnnn nnnnnnnnnn nnnnnnnnnn
34501 nnnnnnnnnn nnnnnnnnnn nnnnnnnnnn nnnnnnnnnn nnnnnnnnnn nnnnnnnnnn
34561 nnnnnnnnnn nnnnnnnnnn nnnnnnnnnn nnnnnnnnnn nnnnnnnnnn nnnnnnnnnn
34621 nnnnnnnnnn nnnnnnnnnn nnnnnnnnnn nnnnnnnnnn nnnnnnnnnn nnnnnnnnnn
34681 nnnnnnnnnn nnnnnnnnnn nnnnnnnnnn nnnnnnnnnn nnnnnnnnnn nnnnnnnnnn
34741 nnnnnnnnnn nnnnnnnnnn nnnnnnnnnn nnnnnnnnnn nnnnnnnnnn nnnnnnnnnn
34801 nnnnnnnnnn nnnnnnnnnn nnnnnnnnnn nnnnnnnnnn nnnnnnnnnn nnnnnnnnnn
34861 nnnnnnnnnn nnnnnnnnnn nnnnnnnnnn nnnnnnnnnn nnnnnnnnnn nnnnnnnnnn
34921 nnnnnnnnnn nnnnnnnnnn nnnnnnnnnn nnnnnnnnnn nnnnnnnnnn nnnnnnnnnn
34981 nnnnnnnnnn nnnnnnnnnn nnnnnnnnnn nnnnnnnnnn nnnnnnnnnn nnnnnnnnnn
35041 nnnnnnnnnn nnnnnnnnnn nnnnnnnnnn nnnnnnnnnn nnnnnnnnnn nnnnnnnnnn
35101 nnnnnnnnnn nnnnnnnnnn nnnnnnnnnn nnnnnnnnnn nnnnnnnnnn nnnnnnnnnn
35161 nnnnnnnnnn nnnnnnnnnn nnnnnnnnnn nnnnnnnnnn nnnnnnnnnn nnnnnnnnnn
35221 nnnnnnnnnn nnnnnnnnnn nnnnnnnnnn nnnnnnnnnn nnnnnnnnnn nnnnnnnnnn
35281 nnnnnnnnnn nnnnnnnnnn nnnnnnnnnn nnnnnnnnnn nnnnnnnnnn nnnnnnnnnn
35341 nnnnnnnnnn nnnnnnnnnn nnnnnnnnnn nnnnnnnnnn nnnnnnnnnn nnnnnnnnnn
35401 nnnnnnnnnn nnnnnnnnnn nnnnnnnnnn nnnnnnnnnn nnnnnnnnnn nnnnnnnnnn
35461 nnnnnnnnnn nnnnnnnnnn nnnnnnnnnn nnnnnnnnnn nnnnnnnnnn nnnnnnnnnn
35521 nnnnnnnnnn nnnnnnnnnn nnnnnnnnnn nnnnnnnnnn nnnnnnnnnn nnnnnnnnnn
35581 nnnnnnnnnn nnnnnnnnnn nnnnnnnnnn nnnnnnnnnn nnnnnnnnnn nnnnnnnnnn
35641 nnnnnnnnnn nnnnnnnnnn nnnnnnnnnn nnnnnnnnnn nnnnnnnnnn nnnnnnnnnn
35701 nnnnnnnnnn nnnnnnnnnn nnnnnnnnnn nnnnnnnnnn nnnnnnnnnn nnnnnnnnnn
35761 nnnnnnnnnn nnnnnnnnnn nnnnnnnnnn nnnnnnnnnn nnnnnnnnnn nnnnnnnnnn
35821 nnnnnnnnnn nnnnnnnnnn nnnnnnnnnn nnnnnnnnnn nnnnnnnnnn nnnnnnnnnn
35881 nnnnnnnnnn nnnnnnnnnn nnnnnnnnnn nnnnnnnnnn nnnnnnnnnn nnnnnnnnnn
35941 nnnnnnnnnn nnnnnnnnnn nnnnnnnnnn nnnnnnnnnn nnnnnnnnnn nnnnnnnnnn
36001 nnnnnnnnnn nnnnnnnnnn nnnnnnnnnn nnnnnnnnnn nnnnnnnnnn nnnnnnnnnn
36061 nnnnnnnnnn nnnnnnnnnn nnnnnnnnnn nnnnnnnnnn nnnnnnnnnn nnnnnnnnnn
36121 nnnnnnnnnn nnnnnnnnnn nnnnnnnnnn nnnnnnnnnn nnnnnnnnnn nnnnnnnnnn
36181 nnnnnnnnnn nnnnnnnnnn nnnnnnnnnn nnnnnnnnnn nnnnnnnnnn nnnnnnnnnn
36241 nnnnnnnnnn nnnnnnnnnn nnnnnnnnnn nnnnnnnnnn nnnnnnnnnn nnnnnnnnnn
36301 nnnnnnnnnn nnnnnnnnnn nnnnnnnnnn nnnnnnnnnn nnnnnnnnnn nnnnnnnnnn
36361 nnnnnnnnnn nnnnnnnnnn nnnnnnnnnn nnnnnnnnnn nnnnnnnnnn nnnnnnnnnn
36421 nnnnnnnnnn nnnnnnnnnn nnnnnnnnnn nnnnnnnnnn nnnnnnnnnn nnnnnnnnnn
36481 nnnnnnnnnn nnnnnnnnnn nnnnnnnnnn nnnnnnnnnn nnnnnnnnnn nnnnnnnnnn
36541 nnnnnnnnnn nnnnnnnnnn nnnnnnnnnn nnnnnnnnnn nnnnnnnnnn nnnnnnnnnn
36601 nnnnnnnnnn nnnnnnnnnn nnnnnnnnnn nnnnnnnnnn nnnnnnnnnn nnnnnnnnnn
36661 nnnnnnnnnn nnnnnnnnnn nnnnnnnnnn nnnnnnnnnn nnnnnnnnnn nnnnnnnnnn
36721 nnnnnnnnnn nnnnnnnnnn nnnnnnnnnn nnnnnnnnnn nnnnnnnnnn nnnnnnnnnn
36781 nnnnnnnnnn nnnnnnnnnn nnnnnnnnnn nnnnnnnnnn nnnnnnnnnn nnnnnnnnnn
36841 nnnnnnnnnn nnnnnnnnnn nnnnnnnnnn nnnnnnnnnn nnnnnnnnnn nnnnnnnnnn
36901 nnnnnnnnnn nnnnnnnnnn nnnnnnnnnn nnnnnnnnnn nnnnnnnnnn nnnnnnnnnn
36961 ntagcttgaa taatctggca ttgctgtact ggaaccaaga tgacacaagc cgcgctcttg
37021 agtttttaac tcaaggaata acagttcaag aacacaacct cactctcaac ttggctgtcg
37081 gttttgagcg acaaaaacgc gattacgtca agactatctc tgctaccaca gatgcttcca
37141 tttcactgca cctcaatggt gctgctaata accccagtgc tgctaattta gctctaagca
37201 cagtcttaca acgcaaagga cgcatcttgg atgtcctcac taatagccag caaattctac
37261 gtcaacgcct agacccagaa agcaagactc tgttaacgaa gttagcaaac acccaaactc
37321 aactagccaa tctattttat aaccgaccag agaaacttcc tcttgagcag tatcggactc
37381 aaattgccca actggaaacc caagcaaaac aactagaaga tcaactgagt cgtcgcagcc
37441 aagaatttcg tactcagtcc cagcttgtca ccattgaaac tgttcaaaaa ttaattcctg
37501 ctgatggtgc tttggtagaa atagtccgct atcgacctgt taatcttaaa gcagcacctg
37561 aagatcagtt tggtaaacct cgttacgcag tatacgtcct tccagcaaaa ggacaaccta
37621 aaggtattga tttaggcgat gctgaaacaa ttgagcaaac tctcatccaa ttacgcaagg
37681 acttgcaaga tcaaaaaact cctatttctc aaatgaaaca gtcggctcgt gagttggatt
37741 caattctcat gcagcctgta cgcaaacttt tgggcaatac tcgcaaaatt ttactctctc
37801 cagacagtca gcttcacctc attccctttg aggcactggt ggatgaaaat aaccgctacc
37861 tactagaaaa ctattctttc acctacctta cctctggacg agacttgctc agactgcaaa
37921 acaaatctgc cagtaaacag ccgccagtta ttattgctga ccccaatttc aatcgtcctg
37981 gcaaattagt tgcgcgtcag ccttatgcta atagtattga tgcaaatacc cgctctatag
38041 acctgtccca gaaagtattt ccccccctcc ccggtacagc acaagaagcc aaggccattg
38101 ccagtctatt aaaaatccaa cctcttacag acactaaggc tactgagggt gctgtcaaac
38161 aagttaacag ccccaggatt ctgcatattg ccacacacgg tatttttgaa aatcccccag
38221 caaacgaagg gaaaaccaca cttgaagata atccgctact gcaatcagga ttagttctag
38281 ctggcttaaa acctcgtcag agtgctggtg aagatgggat tctcactgcc ctggaaacaa
38341 ctacactcaa tctagttggt acaaaactgg tggtactctc tgcctgtaat acaggtttgg
38401 gtaatattaa tgcaggtgaa ggcgtttatg gtttgcgtcg cgctttagtc attgctggtt
38461 ctgaaagcca agtcatcagc ctgtggaaag tagcagatga tgctactaaa gattttatgg
38521 tggcttacta ccaaagatta ttagataatc aaggacgcag tgaagcacta cgccaaacgc
38581 aactagagat gttaaagggt gataagtatc agcatcccta cttctgggct gcgtttatcc
38641 cttctggtga ttggaaaccg atgggtaagt gagttagttt tgagagcttt ggcgatcctt
38701 ccatattatc ggctcaacat gaaatagagt gcgatcgcct ccctcgaaac taaactgttg
38761 attcagcttt gtactgggaa tgcgatgcga tcgccactaa atcttggagt aaatattccc
38821 aaatccttac ggggaagtaa tttgcaaaat tgtacaactt ttttatttct ttttggatag
38881 tagcctgatg aaattgtaga actttatttt ttcaagactt cttagtaatc aacgatataa
38941 caatccttgt agccgcgcaa attatacaac tttattatat ttatacagag gttgtagaga
39001 aataattcga ttcaacaata aagatgttaa aaataacctc taaagaatta ctaaaataat
39061 tgcaaataga ggttattttt attggaacag agacaaaaca ggtttttcaa aggctagagt
39121 ctttcgatat caggtaaaat ttgataaatc tgctgccagt gaggacttat ccagccaaca
39181 atacgcacta cttctcgtaa aattacgata gacaaaccgc attcaacctt ctcaaaagca
39241 gttgcacaat ctgttaatag acttacgaaa ctatctagtt tttgtaattt catctttgct
39301 aatccatctg caaattgccc aatttgagct aatactacac taatttcgcc taaactctct
39361 tcgtccatat ccttacatat taaatcccaa tctttcttga tttctgaaaa tatctcctca
39421 gcttctactt cttgcccttg ttgataaaag gcttctacta aactatataa agctactatc
39481 ttttctggtg tatcttcaat caagcctgct actttcttag ctttagaaca aaagccaaat
39541 cttgctaaga cttgtgttaa attctctaat aaaaatggtt gatcaaaagg attatccatt
39601 tcaagaatca tttcttctat ttagttagc aatatatctg ctctttctgc gtattcaccc
39661 ttataaaggc tatttaataa tattgttaaa gcttggattt ggaaaaaacc agtttcaagt
39721 tttctggcta ttctttcggt agctaaaaat agagtattag catttttggg tttgtttata
39781 caattaaatg cgactgccaa atcagtcatt aatcataagc gataaggctc att
```

[0940] Features of the components in the IB28 locus above, e.g., TnsA, TnsB, TnsC, TniQ (TnsD), Cas5, Cas6, Cas7, Cas8, and CRISPR clusters are shown below.

| FEATURES | Location/Qualifiers |
|---|---|
| glmS | 159 . . . 2033 |
| | /created_by = “makoto” |
| | /label = “glmS” |
| CDS | 159 . . . 2033 |
| | /product = “NA >cl_19425” |
| | /gene = “NA >cl_19425” |
| | /locus_tag = “NA >cl_19425” |
| | /label = “NA >cl 19425 CDS” |
| ITR | 2058 . . . 2124 |
| | /created_by = “makoto” |
| | /label = “RE” |
| motif 3 | 2066 . . . 2084 |
| | /Mismatches = 0 |
| | /%_Identity = 100 |
| | /Motif = “[ATC][AC][AT]AA[AT]AAAGTT[GC]TA[CT]AAT” |
| | /annotation_group = “AttTn7_cluster_3: 11,075,376 → |
| | 11,075,394” |
| | /label = “AttTn7_cluster_3” |
| motif 3 | 2086 . . . 2104 |
| | /Mismatches = 0 |
| | /%_Identity = 100 |
| | /Motif = “[ATC][AC][AT]AA[AT]AAAGTT[GC]TA[CT]AAT” |
| | /annotation_group = “AttTn7_cluster_3: 11,075,396 → |
| | 11,075,414” |
| | /label = “AttTn7_cluster_3” |
| motif 3 | 2106 . . . 2124 |
| | /Mismatches = 1 |
| | /%_Identity = “94.73684210526316” |
| | /Motif = “[ATC][AC][AT]AA[AT]AAAGTT[GC]TA[CT]AAT” |
| | /annotation_group = “AttTn7_cluster_3: 11,075,416 → |
| | 11,075,434” |
| | /label = “AttTn7_cluster_3” |
| tnsA | 2170 . . . 2985 |
| | /product = “1-272\|id: 62.500@bs: 371” |
| | (gene = “1-272\|id: 62.500@bs: 371” |
| | /locus_tag = “1-272\|id: 62.500@bs: 371” |
| | /label = “1-272\|id: 62.500@bs: 371 tnsA” |
| CDS | 2170 . . . 2988 |
| | /product = “tnsA_13 >cl_27484” |
| | /gene = “tnsA_13 >cl_27484” |
| | /locus_tag = “tnsA_13 >cl_27484” |
| | /label = “tnsA 13 >cl 27484 CDS” |
| tnsB | 3010 . . . 5232 |
| | /product = “1-742\|id: 67.564@bs: 1041” |
| | /gene = “1-742\|id: 67.564@bs: 1041” |
| | /locus_tag = “1-742\|id: 67.564@bs: 1041” |
| | /modified_by = “makoto” |
| | /label = “29-B 1-742\|id: 67.564@bs: 1041 tnsB” |
| CDS | 3010 . . . 5238 |
| | /product = “tnsB_14 >cl_26522” |
| | /gene = “tnsB_14 >cl_26522” |
| | /locus_tag = “tnsB_14 >cl_26522” |
| | /label = “tnsB 14 >cl 26522 CDS” |
| tnsC | 5207 . . . 6904 |
| | /product = “2-568\|id: 59.331@bs: 688” |
| | /gene = “2-568\|id: 59.331@bs: 688” |
| | /locus_tag = “2-568\|id: 59.331@bs: 688” |
| | /label = “2-568\|id: 59.331@bs: 688 tnsC” |
| CDS | 5222 . . . 6910 |
| | /product = “NA >cl_6196” |
| | /gene = “NA >cl_6196” |
| | /locus_tag = “NA >cl_6196” |
| | /label = “NA >cl 6196 CDS” |
| tniQ | 6915 . . . 7868 |
| | /product = “1-309\|id: 25.731@bs: 85.1” |
| | /gene = “1-309\|id: 25.731@bs: 85.1” |
| | /locus_tag = “1-309\|id: 25.731@bs: 85.1” |
| | /label = “1-309\|id: 25.731@bs: 85.1 tniQ” |
| CDS | 6915 . . . 7862 |
| | /product = “NA >cl_2402” |
| | /gene = “NA >cl_2402” |
| | /locus_tag = “NA >cl_2402” |
| | /label = “NA >cl 2402 CDS” |
| CDS | 8023 . . . 8691 |
| | /product = “NA >cl_11380” |
| | /gene = “NA >cl_11380” |
| | /locus_tag = “NA >cl_11380” |
| | /label = “NA >cl 11380 CDS” |
| cas6 | 8047 . . . 8688 |
| | /product = “15-227\|id: 63.084@bs: 281” |
| | /gene = “15-227\|id: 63.084@bs: 281” |
| | /locus_tag = “15-227\|id: 63.084@bs: 281” |
| | /label = “15-227\|id: 63.084@bs: 281 cas6” |
| cas8 | 8709 . . . 10238 |
| | /product = “1-512\|id: 64.453@bs: 696” |
| | /gene = “1-512\|id: 64.453@bs: 696” |
| | /locus_tag = “1-512\|id: 64.453@bs: 696” |
| | /label = “1-512\|id: 64.453@bs: 696 cas8” |
| CDS | 8709 . . . 10241 |
| | /product = “devT_19 >cl_6205” |
| | /gene = “devT_19 >cl_6205” |
| | /locus_tag = “devT_19 >cl_6205” |
| | /label = “devT 19 >cl 6205 CDS” |
| cas7 | 10299 . . . 11294 |
| | /product = “1-324\|id: 74.096@bs: 433” |
| | /gene = “1-324\|id: 74.096@bs: 433” |
| | /locus_tag = “1-324\|id: 74.096@bs: 433” |
| | /label = “1-324\|id: 74.096@bs: 433 cas7” |
| CDS | 10299 . . . 11297 |
| | /product = “devR_31 >cl_17591” |
| | /gene = “devR_31 >cl_17591” |
| | /locus_tag = “devR_31 >cl_17591” |
| | /label = “devR 31 >cl 17591 CDS” |
| cas5 | 11299 . . . 11928 |
| | /product = “1-210\|id: 87.619@bs: 390” |
| | /gene = “1-210\|id: 87.619@bs: 390” |
| | /locus_tag = “1-210\|id: 87.619@bs: 390” |
| | /label = “1-210\|id: 87.619@bs: 390 cas5” |
| CDS | 11299 . . . 11931 |
| | /product = “devS_23 >cl_25717” |
| | /gene = “devS_23 >cl_25717” |
| | /locus_tag = “devS_23 >cl_25717” |
| | /label = “devS 23 >cl 25717 CDS” |
| CRISPR | complement(12210 . . . 12538) |
| | /product = “5 CTGCTCAACGCCTAATGGCATCTAATGTTGAAGCAC” (SEQ ID NO: 75) |
| | /gene = “5 CTGCTCAACGCCTAATGGCATCTAATGTTGAAGCAC” (SEQ ID NO: 76) |
| | /locus_tag = “5 CTGCTCAACGCCTAATGGCATCTAATGTTGAAGCAC” (SEQ ID NO; 77) |
| | /label = “5 CTGCTCAACGCCTAATGGCATCTAATGTTGAAGCAC CRISPR” (SEQ ID NO: 78) |
| CDS | complement(12759 . . . 12989) |
| | /product = “NA >cl_2538” |
| | /gene = “NA >cl_2538” |
| | /locus_tag = “NA >cl_2538” |
| | /label = “NA >cl 2538 CDS” |
| CRISPR | complement(13076 . . . 13127) |
| | /product = “2 AGGCATTACACAATAC” (SEQ ID NO: 79) |
| | /gene = “2 AGGCATTACACAATAC” (SEQ ID NO: 80) |
| | /locus_tag = “2 AGGCATTACACAATAC” (SEQ ID NO: 81) |
| | /label = “2 AGGCATTACACAATAC CRISPR” (SEQ ID NO: 82) |
| tniQ | 13283 . . . 15190 |
| | /product = “1-636\|id: 91.352@bs: 1195” |
| | /gene = “1-636\|id: 91.352@bs: 1195” |
| | /locus_tag = “1-636\|id: 91.352@bs: 1195” |
| | /label = “1-636\|id: 91.352@bs: 1195 tniQ” |
| CDS | 13283 . . . 15193 |
| | /product = “NA >cl_1243” |
| | /gene = “NA >cl_1243” |
| | /locus_tag = “NA >cl_1243” |
| | /label = “NA >cl 1243 CDS” |
| CDS | complement(15236 . . . 15541) |
| | /product = “NA >cl_14703” |
| | /gene = “NA >cl_14703” |
| | /locus_tag = “NA >cl_14703” |
| | /label = “NA >cl 14703 CDS” |
| CDS | complement(15672 . . . 15965) |
| | /product = “NA >cl_2353” |
| | /gene = “NA >cl_2353” |
| | /locus_tag = “NA >cl_2353” |
| | /label = “NA >cl 2353 CDS” |
| CDS | 16481 . . . 17014 |
| | /product = “NA >nocl” |
| | /gene = “NA >nocl” |
| | /locus_tag = “NA >nocl” |
| | /label = “NA >nocl CDS” |
| CDS | 17020 . . . 17835 |
| | /product = “NA >nocl” |
| | /gene = “NA >nocl” |
| | /locus_tag = “NA >nocl” |
| | /label = “NA >nocl CDS” |
| CDS | 17819 . . . 18385 |
| | /product = “NA >nocl” |
| | /gene = “NA >nocl” |
| | /locus_tag = “NA >nocl” |
| | /label = “NA >nocl CDS” |
| CDS | 18385 . . . 22101 |
| | /product = “NA >nocl” |
| | /gene = “NA >nocl” |
| | /locus_tag = “NA >nocl” |
| | /label = “NA >nocl CDS” |
| CDS | 22104 . . . 26417 |
| | /product = “NA >nocl” |
| | /gene = “NA >nocl” |
| | /locus_tag = “NA >nocl” |
| | /label = “NA >nocl CDS” |
| CDS | 26417 . . . 27772 |
| | /product = “NA >nocl” |
| | /gene = “NA >nocl” |
| | /locus_tag = “NA >nocl” |
| | /label = “NA >nocl CDS” |
| CDS | 27863 . . . 28972 |
| | /product = “NA >nocl” |
| | /gene = “NA >nocl” |
| | /locus_tag = “NA >nocl” |
| | /label = “NA >nocl CDS” |
| CDS | 28983 . . . 31016 |
| | /product = “NA >nocl” |
| | /gene = “NA >nocl” |
| | /locus_tag = “NA >nocl” |
| | /label = “NA >nocl CDS” |
| CDS | 31850 . . . 33103 |
| | /product = “NA >nocl” |
| | /gene = “NA >nocl” |
| | /locus_tag = “NA >nocl” |
| | /label = “NA >nocl CDS” |
| CDS | 33094 . . . 34188 |
| | /product = “NA >nocl” |
| | /gene = “NA >nocl” |
| | /locus_tag = “NA >nocl” |
| | /label = “NA >nocl CDS” |
| CDS | 36966 . . . 38672 |
| | /product = “NA >nocl” |
| | /gene = “NA >nocl” |
| | /locus_tag = “NA >nocl” |
| | /label = “NA >nocl CDS” |
| ITR | complement(38849 . . . 38987) |
| | /created_by = “makoto” |
| | /label = “Left End” |
| motif 3 | complement(38849 . . . 38867) |
| | /Mismatches = 0 |
| | /%_Identity = 100 |
| | /Motif = “[ATC][AC][AT]AA[AT]AAAGTT[GC]TA[CT]AAT” |
| | /annotation_group = “AttTn7_cluster_3: 11,112,159 ← |
| | 11,112,177” |
| | /label = “AttTn7_cluster_3” |
| motif 3 | complement(38893 . . . 38911) |
| | /Mismatches = 0 |
| | /%_Identity = 100 |
| | /Motif = “[ATC][AC][AT]AA[AT]AAAGTT[GC]TA[CT]AAT” |
| | /annotation_group = “AttTn7_cluster_3: 11,112,203 ← |
| | 11,112,221” |
| | /label = “AttTn7_cluster 3” |
| motif 3 | complement(38961 . . . 38979) |
| | /Mismatches = 0 |
| | /%_Identity = 100 |
| | /Motif = “[ATC][AC][AT]AA[AT]AAAGTT[GC]TA[CT]AAT” |
| | /annotation_group = “AttTn7_cluster_3: 11,112,271 ← |
| | 11,112,289” |
| | /label = “AttTn7_cluster_3” |
| CDS | complement(39114 . . . 39809) |
| | /product = “NA >nocl” |
| | /gene = “NA >nocl” |
| | /locus_tag = “NA >nocl” |
| | /label = “NA >nocl CDS” |
| CDS | complement(39813 . . . >39833) |
| | /product = “NA >nocl” |
| | /gene = “NA >nocl” |
| | /locus_tag = “NA >nocl” |
| | /label = “NA >nocl CDS” |

### Example 18

[0941] FIG. 55 shows exemplary CAST systems comprising Type IB Cas proteins.

[0942] Applicants generated constructs expressing exemplary CAST (T24) attached with various NLS (FIG. 56). V1.N-tag and v1.C tag were mixed for all ORFs. V.4 NLS was a c-Myc and SV40 fusion artificial bipartite NLS.

[0943] Subcellular localization of components of T24 attached with v1 NLS is shown in FIG. 57. Cas8, TnsC, and TnsD1 did not go to nucleus. Subcellular localization of components of T24 attached with other versions of NLS is shown in FIG. 58.

[0944] Applicants generated plasmids with the various NLS with T24, and tested their targeting activities (FIG. 59). V4 NLS for Cas8, TnsC, and TnsD1 was functional. FIG. 60 shows an exemplary experiment for testing mammalian genome targeting with t24. The targeting of the plasmids at 96-well format with QE (FIG. 61).

[0945] PCR experiments were performed to test the plasmids' effects on target genes (FIG. 62). 0.3×10⁵ cells were used at genome extraction. 40 μL QE, 10 μL (25% of total cells in well) in 50 μL PCR reaction. Odd number lanes ran all components transfection, and even number lanes ran controls (transfection without TnsD1). Expected amplicon size was 200-400 bp for the guides.

[0946] Subcellular localization of Cascade components of IB28 CAST system is shown in FIG. 63. Cas8 did not go to nucleus. Subcellular localization of Tns components of IB28 CAST system is shown in FIG. 64. TnsA, TnsC, and TnsD1 did not go to nucleus. Subcellular localization of components of IB28 CAST system with various versions of NLS is shown in FIG. 65. Applicants generated plasmids with the various NLS with IB28, and tested their targeting activities (FIG. 66).

[0947] Subcellular localization of Cascade components of v.1 of NLS for IB18 is shown in FIG. 67. Cas8 did not go to nucleus.

[0948] Subcellular localization of Tns components of v.1 of NLS for IB18 is shown in FIG. 68. N-tag TnsC and TnsD did not go to nucleus.

### Example 19

[0949] An exemplary CAST system IB20 was characterized. FIG. 69 shows the locus of IB20. FIG. 70 shows the function of IB IB20 in mammalian cells. FIG. 71 shows the result from screening of PAM sequences.

[0950] The plasmids and relevant sequences are summarized below.

TABLE 9

| | Plasmid | | Expression |
|---|---|---|---|
| Plasmids | Maps | Expression cassette sequences | cassette Maps |
| IB20_pCMV- | FIG. 72 | Cas5-NLS-HA: | Cas5-NLS-HA: |
| Cas5-NLS-HA | | MIAPLILYLDVPFTTFRESHAREMGKTYPVPPPATVYGMLLSLVGE | FIG. 73 |
| | | TNVYRHCGVELAIAMLSSPKKSRILRQMRRFKNADFSHPENVIPC | |
| | | YQEILSNLKCLIWVRSDEEKIQPSLRERIQLAFDHPELVRRFGCLFL | |
| | | GESDQLIKTIKLAREDYLEGVRQWAIRDNRGRLTLPYWVDHVGS | |
| | | RNTRFLRYRIEEMDRLSPPDLAWTMVQSPIGGSGGGGSGGGGSGG | |
| | | PKKKRKVYPYDVPDYA* (SEQ ID NO: 83) | |
| IB20_pCMV- | FIG. 74 | Cas6-NLS-HA: | Cas6-NLS-HA: |
| Cas6-NLS-HA | | MTAILIQSEEYVDLTFKLRGAPIPLDNGYLTYAALSRICPPLHELKS | FIG. 75 |
| | | IGIHPIAGIPTRNNLLELTAQSRLKIRIYHQQIPLIYPYLAGQAFHIGQ | |
| | | NFYQLDIPDYKPLISSESVYSRLVIIKGFQDSTNFIEAVQRQMDNLG | |
| | | IQGKIELLTRQDGTPQRRQLTINKEGKQFKVRGFGVKISELNPEDS | |
| | | LTLQEQGIGGKRKMMCGIFVPATRSKEEEETGGSGGGGSGGGGSG | |
| | | GPKKKRKVYPYDVPDYA* (SEQ ID NO: 84) | |
| IB20_pCMV- | FIG. 76 | Cas7-NLS-HA: | Cas7-NLS-HA: |
| Cas7-NLS-HA | | MMTQKKNDSNIPNYYLYGTVLTRYGLASLNHDIRRGNKTILQKG | FIG. 77 |
| | | YWNNGKIHSFVGSSAIRWALRFYLQKQGYLVNRVWDEEEHINRL | |
| | | TSEDFDPEKFYDDDIFGFALLESAETEEDTSTTKRKKKQTKTSTPN | |
| | | QRMGALGMNMAVSLTPYDGAVKLGAKSGREKDSTSLHFTEYHA | |
| | | TRYQYYFGIDATHLKDFSRILPMIDGIMNLPKVGGSSNIFNYPFCPD | |
| | | SLVFQWTNHFASYISYCFEYCDPKSKEAKLSQEFIDEVECGQIDPS | |
| | | KLWIGGTIVKDLQQLDNFESSPLNKAHIYRNRNEMIEALKTVIKRD | |
| | | LGLEESKGGSGGGGSGGGGSGGPKKKRKVYPYDVPDYA* (SEQ | |
| | | ID NO: 85) | |
| BB20_pCMV- | FIG. 78 | Cas8-NLS-HA: | Cas8-NLS-HA: |
| Cas8-NLS-HA | | MIVSTQPKISLSLHAADTTIMHRVGMTGLYMTLKRLEKQYPLSRQ | FIG. 79 |
| | | RGGHISWFLTADTIELFWEGSDFIALSWLINESFQLDDTGLIHLVGL | |
| | | DNDRIDLRQKIHIHEGICGVFLRLNKFYQAGEIINTELRFEEKQVEY | |
| | | QYKSLTWYAHQTFAEKLCEADTQQLRHDYIQITSWLYLGGIVRH | |
| | | ARTQNTTKLEEKPEYALALLFVPVVCHYCLLHIPSEDLKERKPHR | |
| | | YLVVIPEIKDFEDASQRRWRLQQLETKQFHVSSLGEAGLLYYSLD | |
| | | DIQPEVAYYQACQVWLYEKTNKASRQRTLMSIEEIKIDKNILITYQ | |
| | | QVQKYFKTNYQIIKYKQIFIKVNPIRSLIADNLVKGIHWWSNFWEK | |
| | | LVIEDSKEYLFNQLFSNREGFIIMAENSEEDKQYLIFIKVFQQAMK | |
| | | GNFAKIYAKTEEGKDPPIKKKVERLRAELNYCYDELSFKEYLSDFL | |
| | | VRGGLNKYFNEHQEEIALLIKKSPWQEIRIWSLLAIASYKPKDKLT | |
| | | NRDDSSLSNNQKLEEVNDDSEEEGGSGGGGSGGGGSGGPKKKRK | |
| | | VYPYDVPDYA* (SEQ ID NO: 86) | |
| IB20_pCMV- | FIG. 80 | HA-NLS-Cas5: | HA-NLS-Cas5: |
| HA-NLS-Cas5 | | MYPYDVPDYAPKKKRKVGGSGGGGSGGGGSGGIAPLILYLDVPF | FIG. 81 |
| | | TTFRESHAREMGKTYPVPPPATVYGMLLSLVGETNVYRHCGVEL | |
| | | AIAMLSSPKKSRILRQMRRFKNADFSHPENVIPCYQEILSNLKCLIW | |
| | | VRSDEEKIQPSLRERIQLAFDHPELVRRFGCLFLGESDQLIKTIKLA | |
| | | REDYLEGVRQWAIRDNRGRLTLPYWVDHVGSRNTRFLRYRIEEM | |
| | | DRLSPPDLAWTMVQSPI* (SEQ ID NO: 87) | |
| IB20_pCMV- | FIG. 82 | HA-NLS-Cas6: | HA-NLS-Cas6: |
| HA-NLS-Cas6 | | MYPYDVPDYAPKKKRKVGGSGGGGSGGGGSGGTAILIQSEEYVD | FIG. 83 |
| | | LTFKLRGAPIPLDNGYLTYAALSRICPPLHELKSIGIHPIAGIPTRNN | |
| | | LLELTAQSRLKIRIYHQQIPLIYPYLAGQAFHIGQNFYQLDIPDYKP | |
| | | LISSESVYSRLVIIKGFQDSTNFIEAVQRQMDNLGIQGKIELLTRQD | |
| | | GTPQRRQLTINKEGKQFKVRGFGVKISELNPEDSLTLQEQGIGGKR | |
| | | KMMCGIFVPATRSKEEEET* (SEQ ID NO: 88) | |
| IB20_pCMV- | FIG. 84 | HA-NLS-Cas7: | HA-NLS-Cas7: |
| HA-NLS-Cas7 | | MYPYDVPDYAPKKKRKVGGSGGGGSGGGGSGGMTQKKNDSNIP | FIG. 85 |
| | | NYYLYGTVLTRYGLASLNHDIRRGNKTILQKGYWNNGKIHSFVG | |
| | | SSAIRWALRFYLQKQGYLVNRVWDEEEHINRLTSEDFDPEKFYDD | |
| | | DIFGFALLESAETEEDTSTTKRKKKQTKTSTPNQRMGALGMNMA | |
| | | VSLTPYDGAVKLGAKSGREKDSTSLHFTEYHATRYQYYFGIDATH | |
| | | LKDFSRILPMIDGIMNLPKVGGSSNIFNYPFCPDSLVFQWTNHFAS | |
| | | YISYCFEYCDPKSKEAKLSQEFIDEVECGQIDPSKLWIGGTIVKDLQ | |
| | | QLDNFESSPLNKAHIYRNRNEMIEALKTVIKRDLGLEESK* (SEQ | |
| | | ID NO: 89) | |
| IB20_pCMV- | FIG. 86 | HA-NLS-Cas8: | HA-NLS-Cas8: |
| HA-NLS-Cas8 | | MYPYDVPDYAPKKKRKVGGSGGGGSGGGGSGGIVSTQPKISLSL | FIG. 87 |
| | | HAADTTIMHRVGMTGLYMTLKRLEKQYPLSRQRGGHISWFLTAD | |
| | | TIELFWEGSDFIALSWLINESFQLDDTGLIHLVGLDNDRIDLRQKIH | |
| | | IHEGICGVFLRLNKFYQAGEIINTELRFEEKQVEYQYKSLTWYAHQ | |
| | | TFAEKLCEADTQQLRHDYIQITSWLYLGGIVRHARTQNTTKLEEK | |
| | | PEYALALLFVPVVCHYCLLHIPSEDLKERKPHRYLVVIPEIKDFED | |
| | | ASQRRWRLQQLETKQFHVSSLGEAGLLYYSLDDIQPEVAYYQAC | |
| | | QVWLYEKTNKASRQRTLMSIEEIKIDKNILITYQQVQKYFKTNYQI | |
| | | IKYKQIFIKVNPIRSLIADNLVKGIHWWSNFWEKLVIEDSKEYLFN | |
| | | QLFSNREGFIIMAENSEEDKQYLIFIKVFQQAMKGNFAKIYAKTEE | |
| | | GKDPPIKKKVERLRAELNYCYDELSFKEYLSDFLVRGGLNKYFNE | |
| | | HQEEIALLIKKSPWQEIRIWSLLAIASYKPKDKLTNRDDSSLSNNQ | |
| | | KLEEVNDDSEEE* (SEQ ID NO: 90) | |
| BB20_pCMV- | FIG. 88 | HA-NLS-TniQ1: | HA-NLS- |
| HA-NLS-TniQ1 | | MYPYDVPDYAPKKKRKVGGSGGGGSGGGGSGGTIYSEHWSLNPL | TniQ1: |
| | | EIPQRSRLFSLEPVAVGTPYAESLSSYLHRLAQAHCLTSEKLVMGE | FIG. 89 |
| | | IAPLILKDEDKSELLSKNLSHLLGNSDAKPAINGMREMTEKLVTVL | |
| | | EELTMRQDLRFLTLLSWKGMIYDKGLFRNYRAWCPCCCEEWMQ | |
| | | KNKTIYEPLSWSFKDVEFCLIHKQRLIEECSHCGARLPVMARLSPA | |
| | | GFCSRCYGWLGQEIKGEEEIEKYRVNIQGISELIALTPQLGYKPIPIE | |
| | | LTRKLQLILLVFEQAIGKDVKLLGDLGGIMESLRIASTTNQSQPYH | |
| | | LVKLIIPVCEKAKISVFQLFGSDFKELGKILFGNFSLELKL* (SEQ ID | |
| | | NO: 91) | |
| IB20_pCMV- | FIG. 90 | HA-NLS-TniQ2 | HA-NLS- |
| HA-NLS-TniQ2 | | MYPYDVPDYAPKKKRKVGGSGGGGSGGGGSGGLASVLETYESW | TniQ2: |
| | | NLKKPLIPQRSRLYQPQPVGIGTPYIESLTGYITRIAELHGVLPGVL | FIG. 91 |
| | | MTREIAPLVNKIYFQNGANRGFREIFNRSQALNGMGEMAADLVQ | |
| | | VLQKLTLRDDLRFLTMLFWSNILTPRNLFRTRKAWCPICYQERHQ | |
| | | NGLVVYEQLLWTINLITICPQHQKPLVELCPHCNHESPLLNWRSRP | |
| | | GYCSKCGEWLGANQCLKTFTDGEGSIKLQLEWQYWTANVVGELI | |
| | | LASQCFESAPSKENITKSLNIVIDKVAENNAAAFSRLIGVPKNSLW | |
| | | MWQSTKTLPELNTLLKICYELEISLVEFLTPKNLITKSFTKISQKHL | |
| | | QLSRTPRVSPKSFDQYQVKDALLAILAGNEEPPPTMEEVGKRLGH | |
| | | HNRTISRHFPDLCSAISAKCRNYNKACRLKSIEKLCSEVREIVLSLN | |
| | | AQGVYPTEGRVCELMPNPGCFRYKQVRAAFNDARREFGL* (SEQ | |
| | | ID NO: 92) | |
| IB20_pCMV- | FIG. 92 | HA-NLS-TnsA | HA-NLS-TnsA: |
| HA-NLS-TnsA | | MYPYDVPDYAPKKKRKVGGSGGGGSGGGGSGGKEQFEQWVAR | FIG. 93 |
| | | LQISEAGQKIIEKVRSSEPSRRVGGGSKNVSGRYPSRKMGVTIQFES | |
| | | HRVELPIIYQLEHDKDVLEFYDQPPQIKLDYQASNGRRLGVLHTPD | |
| | | LFVIRTNSAGWEECKTEQDLKKLAEKNPNRYFYSEENNQWHSLP | |
| | | GEVYANQFGLYHRIHSDREINWVLQRNLQFLEDYYRSESLVVEEA | |
| | | IAQSLLAIVSSQPGITLAELLNRSTGAKSDDIYTLIIQEQIYIDLNATP | |
| | | LAEPERCLIFRDEQTASAYRLMVEQPSVSLPAISPVVNIVTGATVS | |
| | | WDGKGLNIIHVGETEVILGAENNQLIELKKAIFENLVRQGKITSLQ | |
| | | TPEKTAISTESWQRFHQASPEDQAEALERYKTIEPYLNGHPPENETI | |
| | | PARTIRHWKAKYLIAIQKYGCGYIGLLSHRSVKGNRQRKLPEDTL | |
| | | AIMEKFILEDYETLKQKRMWEVHAALVRACEEAGVIAPSYKAFT | |
| | | KEVQRRTGYEQTKKRQGRRAAYQHESFYWELAITTPRHGDRPFEI | |
| | | GHIDHTELDVELVCSDTGRNLGRPWATFLVDAYSRRLLAVYLTFD | |
| | | SPSYRSCLMVLRICVKRHGRLPQIVVVDNGAEFHSVYFETLLATFE | |
| | | CTKKQRPPAKARFGSVCERLFGTSNTQFVHNLLGNTQITRNVRQV | |
| | | TKSVNPKNLAVWTLGLLYEYLCAWAYEVYDTDEHPALFQSPRDA | |
| | | FAAGMAIGGSRVHRMIPYDENFQILTLPTTSEGKAKVQVGRGIKIN | |
| | | YIYYWSNSFRDPQIENTSVQIRYDPFNIGIAYAFVRGQWVQCISQY | |
| | | YAELQGRSEKELKLASIELRKHYSNHTQQSKVSAKNLAEFLASVE | |
| | | AQEALLEQRSYDAEVKEVFRVIEGGKATTSRNEEPKLIQVTFANT | |
| | | DFQADEDEAIVPETLVVYEEF* (SEQ ID NO: 93) | |
| IB20_pCMV- | FIG. 94 | HA-NLS-TnsC | HA-NLS-TnsC: |
| HA-NLS-TnsC | | MYPYDVPDYAPKKKRKVGGSGGGGSGGGGSGGTKSTGFPLELLT | FIG. 95 |
| | | RPATERLAYFENYTVAHPRLKEVYEILMRTIAEPAGASFIFVYGAS | |
| | | GVGKTTLRLRVEQKLTELALPKLESDRARVPVVGIEAIAPESRYFN | |
| | | WKEYYTRALITLEEPLIDHKFDYGVRGISRDNFGKINVESKVVAPA | |
| | | LRRALENALIHRHPDVFFVDEAQHFGKVASGYKLQDQLDCLKSL | |
| | | ANMTGILHCLLGTYELLTFRNLSGQLSRRSVDIHFRRYCADSPEDV | |
| | | QAFKSVLLTFQQHLPLAETPNLVDHWEYFYERTLGCIGTLKDWLK | |
| | | RVLSDALDREATTITLKDLQKRALSVAQCQKMFKEIQEGERQLSE | |
| | | TEADVQNLRSALGLGAKPIVLPEETPKTTRPPGKVGKRKPKRDPIG | |
| | | VQQDVS* (SEQ ID NO: 94) | |
| IB20_pCMV- | FIG. 96 | TniQ1-NLS-HA | TniQ1-NLS-HA |
| TniQ1-NLS-HA | | MTIYSEHWSLNPLEIPQRSRLFSLEPVAVGTPYAESLSSYLHRLAQ | FIG. 97 |
| | | AHCLTSEKLVMGEIAPLILKDEDKSELLSKNLSHLLGNSDAKPAIN | |
| | | GMREMTEKLVTVLEELTMRQDLRFLTLLSWKGMIYDKGLFRNYR | |
| | | AWCPCCCEEWMQKNKTIYEPLSWSFKDVEFCLIHKQRLIEECSHC | |
| | | GARLPVMARLSPAGFCSRCYGWLGQEIKGEEEIEKYRVNIQGISEL | |
| | | IALTPQLGYKPIPIELTRKLQLILLVFEQAIGKDVKLLGDLGGIMES | |
| | | LRIASTTNQSQPYHLVKLIIPVCEKAKISVFQLFGSDFKELGKILFG | |
| | | NFSLELKLGGSGGGGSGGGGSGGPKKKRKVYPYDVPDYA* (SEQ | |
| | | ID NO: 95) | |
| IB20_pCMV- | FIG. 98 | TniQ2-NLS-HA: | TniQ2-NLS-HA |
| TniQ2-NLS-HA | | MLASVLETYESWNLKKPLIPQRSRLYQPQPVGIGTPYIESLTGYITR | FIG. 99 |
| | | IAELHGVLPGVLMTREIAPLVNKIYFQNGANRGFREIFNRSQALNG | |
| | | MGEMAADLVQVLQKLTLRDDLRFLTMLFWSNILTPRNLFRTRKA | |
| | | WCPICYQERHQNGLVVYEQLLWTINLITICPQHQKPLVELCPHCN | |
| | | HESPLLNWRSRPGYCSKCGEWLGANQCLKTFTDGEGSIKLQLEW | |
| | | QYWTANVVGELILASQCFESAPSKENITKSLNIVIDKVAENNAAAF | |
| | | SRLIGVPKNSLWMWQSTKTLPELNTLLKICYELEISLVEFLTPKNLI | |
| | | TKSFTKISQKHLQLSRTPRVSPKSFDQYQVKDALLAILAGNEEPPP | |
| | | TMEEVGKRLGHHNRTISRHFPDLCSAISAKCRNYNKACRLKSIEKL | |
| | | CSEVREIVLSLNAQGVYPTEGRVCELMPNPGCFRYKQVRAAFND | |
| | | ARREFGLGGSGGGGSGGGGSGGPKKKRKVYPYDVPDYA* (SEQ | |
| | | ID NO: 96) | |
| IB20_pCMV- | FIG. 100 | TnsA-NLS-HA | TnsA-NLS-HA: |
| TnsA-NLS-HA | | MKEQFEQWVARLQISEAGQKIIEKVRSSEPSRRVGGGSKNVSGRY | FIG. 101 |
| | | PSRKMGVTIQFESHRVELPIIYQLEHDKDVLEFYDQPPQIKLDYQA | |
| | | SNGRRLGVLHTPDLFVIRTNSAGWEECKTEQDLKKLAEKNPNRYF | |
| | | YSEENNQWHSLPGEVYANQFGLYHRIHSDREINWVLQRNLQFLE | |
| | | DYYRSESLVVEEAIAQSLLAIVSSQPGITLAELLNRSTGAKSDDIYT | |
| | | LIIQEQIYIDLNATPLAEPERCLIFRDEQTASAYRLMVEQPSVSLPAI | |
| | | SPVVNIVTGATVSWDGKGLNIIHVGETEVILGAENNQLIELKKAIF | |
| | | ENLVRQGKITSLQTPEKTAISTESWQRFHQASPEDQAEALERYKTI | |
| | | EPYLNGHPPENETIPARTIRHWKAKYLIAIQKYGCGYIGLLSHRSV | |
| | | KGNRQRKLPEDTLAIMEKFILEDYETLKQKRMWEVHAALVRACE | |
| | | EAGVIAPSYKAFTKEVQRRTGYEQTKKRQGRRAAYQHESFYWEL | |
| | | AITTPRHGDRPFEIGHIDHTELDVELVCSDTGRNLGRPWATFLVDA | |
| | | YSRRLLAVYLTFDSPSYRSCLMVLRICVKRHGRLPQIVVVDNGAE | |
| | | FHSVYFETLLATFECTKKQRPPAKARFGSVCERLFGTSNTQFVHNL | |
| | | LGNTQITRNVRQVTKSVNPKNLAVWTLGLLYEYLCAWAYEVYD | |
| | | TDEHPALFQSPRDAFAAGMAIGGSRVHRMIPYDENFQILTLPTTSE | |
| | | GKAKVQVGRGIKINYIYYWSNSFRDPQIENTSVQIRYDPFNIGIAY | |
| | | AFVRGQWVQCISQYYAELQGRSEKELKLASIELRKHYSNHTQQSK | |
| | | VSAKNLAEFLASVEAQEALLEQRSYDAEVKEVFRVIEGGKATTSR | |
| | | NEEPKLIQVTFANTDFQADEDEAIVPETLVVYEEFGGSGGGGSGG | |
| | | GGSGGPKKKRKVYPYDVPDYA* (SEQ ID NO: 97) | |
| IB20_pCMV- | FIG. 102 | TnsC-NLS-HA: | TnsC-NLS-HA: |
| TnsC-NLS-HA | | MTKSTGFPLELLTRPATERLAYFENYTVAHPRLKEVYEILMRTIAE | FIG. 103 |
| | | PAGASFIFVYGASGVGKTTLRLRVEQKLTELALPKLESDRARVPV | |
| | | VGIEAIAPESRYFNWKEYYTRALITLEEPLIDHKFDYGVRGISRDNF | |
| | | GKINVESKVVAPALRRALENALIHRHPDVFFVDEAQHFGKVASGY | |
| | | KLQDQLDCLKSLANMTGILHCLLGTYELLTFRNLSGQLSRRSVDI | |
| | | HFRRYCADSPEDVQAFKSVLLTFQQHLPLAETPNLVDHWEYFYER | |
| | | TLGCIGTLKDWLKRVLSDALDREATTITLKDLQKRALSVAQCQK | |
| | | MFKEIQEGERQLSETEADVQNLRSALGLGAKPIVLPEETPKTTRPP | |
| | | GKVGKRKPKRDPIGVQQDVSGGSGGGGSGGGGSGGPKKKRKVY | |
| | | PYDVPDYA* (SEQ ID NO: 98) | |

[0951] FIG. 104 shows the donor plasmid (pDonor_IB20-CmR) map. The sequence with is below.

| | |
|---|---|
| primer_bind | 379 . . . 395 |
| | /label = M13 fwd |
| | /note = “common sequencing primer, one of multiple similar |
| | variants” |
| misc_feature | 416 . . . 470 |
| | /label = gblock |
| misc_feature | 471 . . . 475 |
| | /label = TSD? |
| misc_feature | 476 . . . 631 |
| | /label = IB20-RE |
| misc_feature | 484 . . . 501 |
| | /label = attTn7 |
| primer_bind | complement(497 . . . 521) |
| | /label = Primer 1350 |
| misc_feature | 507 . . . 524 |
| | /label = attTn7 |
| misc_feature | 584 . . . 601 |
| | /label = attTn7 |
| primer_bind | complement(597 . . . 619) |
| | /label = Primer 1351 |
| misc_feature | 614 . . . 631 |
| | /label = attTn7 |
| misc_feature | 632 . . . 691 |
| | /label = Rside-60bp |
| misc_feature | 1360 . . . 1419 |
| | /label = Lside-60bp |
| primer_bind | 1362 . . . 1386 |
| | /label = Primer 1353 |
| misc_feature | 1420 . . . 1491 |
| | /label = IB20-LE |
| misc_feature | 1420 . . . 1437 |
| | /label = attTn7 |
| misc_feature | 1447 . . . 1464 |
| | /label = attTn7 |
| primer_bind | 1450 . . . 1469 |
| | /label = Primer 1352 |
| misc_feature | complement(1466 . . . 1483) |
| | /label = attTn7 |
| misc_feature | 1492 . . . 1496 |
| | /label = TSD? |
| misc_feature | 1497 . . . 1551 |
| | /label = gblock |

(SEQ ID NO: 99)

| | |
|---|---|
| 1 | tcgcgcgttt cggtgatgac ggtgaaaacc tctgacacat gcagctcccg gagacggtca |
| 61 | cagcttgtct gtaagcggat gccgggagca gacaagcccg tcagggcgcg tcagcgggtg |
| 121 | ttggcgggtg tcggggctgg cttaactatg cggcatcaga gcagattgta ctgagagtgc |
| 181 | accatatgcg gtgtgaaata ccgcacagat gcgtaaggag aaaataccgc atcaggcgcc |
| 241 | attcgccatt caggctgcgc aactgttggg aagggcgatc ggtgcgggcc tcttcgctat |
| 301 | tacgccagct ggcgaaaggg ggatgtgctg caaggcgatt aagttgggta acgccagggt |
| 361 | tttcccagtc acgacgttgt aaaacgacgg ccagtgaatt gacgcgtatt gggatcaatg |
| 421 | gctggtacta taattcccct ggttgctgaa gcggtaaaag tgcgtcaact agttttgtga |
| 481 | ctttacccat aactttgccg ttactggaac cataactttg ccgtcaacaa cactacaacc |
| 541 | ctcattcttg cgtcagctaa ttttggatga aattgacagt ttggaaccat aactttgccg |
| 601 | ctagtccaaa ttggaaggat aagcttgccg tgagtccaat caagcataga aagcaggaaa |
| 661 | acgccgaatt tttttagaat ggagcagaag cgtcgatgga gaaaaaaatc actggatata |
| 721 | ccaccgttga tatatcccaa tggcatcgta aagaacattt tgaggcattt cagtcagttg |
| 781 | ctcaatgtac ctataaccag accgttcagc tggatattac ggccttttta aagaccgtaa |
| 841 | agaaaaataa gcacaagttt tatccggcct ttattcacat tcttgcccgc ctgatgaatg |
| 901 | ctcatccgga gttccgtatg gcaatgaaag acggtgagct ggtgatatgg gatagtgttc |
| 961 | acccttgtta caccgttttc catgagcaaa ctgaaacgtt ttcatcgctc tggagtgaat |
| 1021 | accacgacga tttccggcag tttctacaca tatattcgca agatgtggcg tgttacggtg |
| 1081 | aaaacctggc ctatttccct aaagggttta ttgagaatat gtttttcgtc tcagccaatc |
| 1141 | cctgggtgag tttcaccagt tttgatttaa acgtggccaa tatggacaac ttcttcgccc |
| 1201 | ccgttttcac tatgggcaaa tattatacgc aaggcgacaa ggtgctgatg ccgctggcga |
| 1261 | ttcaggttca tcatgccgtt tgtgatggct tccatgtcgg cagaatgctt aatgaattac |
| 1321 | aacagtactg cgatgagtgg cagggcgggg cgtaacactc acgacgtgag tttggtttgt |
| 1381 | aagctgttat atgtaaaact agaacagctt atataactgg aaccataacc ttgccaccct |
| 1441 | ttattggaag cataagcttg ccgttgcggc aaagttatgg gtaaagtcac atctaagctg |
| 1501 | tctctagcct ttatttactg aatgggcagt accagactcg aactgatgac aatcccaatg |
| 1561 | gcgcgccgag cttggcgtaa tcatggtcat agctgtttcc tgtgtgaaat tgttatccgc |
| 1621 | tcacaattcc acacaacata cgagccggaa gcataaagtg taaagcctgg ggtgcctaat |
| 1681 | gagtgagcta actcacatta attgcgttgc gctcactgcc cgctttccag tcgggaaacc |
| 1741 | tgtcgtgcca gctgcattaa tgaatcggcc aacgcgcggg gagaggcggt ttgcgtattg |
| 1801 | ggcgctcttc cgcttcctcg ctcactgact cgctgcgctc ggtcgttcgg ctgcggcgag |
| 1861 | cggtatcagc tcactcaaag gcggtaatac ggttatccac agaatcaggg gataacgcag |
| 1921 | gaaagaacat gtgagcaaaa ggccagcaaa aggccaggaa ccgtaaaaag gccgcgttgc |
| 1981 | tggcgttttt ccataggctc cgcccccctg acgagcatca caaaatcaca aaaatcgacg |
| 2041 | ctcaagtcag aggtggcgaa acccgacagg actataaaga taccaggcgt ttccccctgg |
| 2101 | aagctccctc gtgcgctctc ctgttccgac cctgccgctt accggatacc tgtccgcctt |
| 2161 | tctcccttcg ggaagcgtgg cgctttctca tagctcacgc tgtaggtatc tcagttcggt |
| 2221 | gtaggtcgtt cgctccaagc tgggctgtgt gcacgaaccc cccgttcagc ccgaccgctg |
| 2281 | cgccttatcc ggtaactatc gtcttgagtc caacccggta agacacgact tatcgccact |
| 2341 | ggcagcagcc actggtaaca ggattagcag agcgaggtat gtaggcggtg ctacagagtt |
| 2401 | cttgaagtgg tggcctaact acggctacac tagaagaaca gtatttggta tctgcgctct |
| 2461 | gctgaagcca gttaccttcg gaaaaagagt tggtagctct tgatccggca aacaaaccac |
| 2521 | cgctggtagc ggtggttttt ttgtttgcaa gcagcagatt acgcgcagaa aaaaaggatc |
| 2581 | tcaagaagat cctttgatct tttctacggg gtctgacgct cagtggaacg aaaactcacg |
| 2641 | ttaagggatt ttggtcatga gattatcaaa aaggatcttc acctagatcc ttttaaatta |
| 2701 | aaaatgaagt tttaaatcaa tctaaagtat atatgagtaa acttggtctg acagttacca |
| 2761 | atgcttaatc agtgaggcac ctatctcagc gatctgtcta tttcgttcat ccatagttgc |
| 2821 | ctgactcccc gtcgtgtaga taactacgat acgggagggc ttaccatctg gccccagtgc |
| 2881 | tgcaatgata ccgcgagacc cacgctcacc ggctccagat ttatcagcaa taaaccagcc |
| 2941 | agccggaagg gccgagcgca gaagtggtcc tgcaacttta tccgcctcca tccagtctat |
| 3001 | taattgttgc cgggaagcta gagtaagtag ttcgccagtt aatagtttgc gcaacgttgt |
| 3061 | tgccattgct acaggcatcg tggtgtcacg ctcgtcgttt ggtatggctt cattcagctc |
| 3121 | cggttcccaa cgatcaaggc gagttacatg atcccccatg ttgtgcaaaa aagcggttag |
| 3181 | ctccttcggt cctccgatcg ttgtcagaag taagttggcc gcagtgttat cactcatggt |
| 3241 | tatggcagca ctgcataatt ctcttactgt catgccatcc gtaagatgct tttctgtgac |
| 3301 | tggtgagtac tcaaccaagt cattctgaga atagtgtatg cggcgaccga gttgctcttg |
| 3361 | cccggcgtca atacgggata ataccgcgcc acatagcaga actttaaaag tgctcatcat |
| 3421 | tggaaaacgt tcttcggggc gaaaactctc aaggatctta ccgctgttga gatccagttc |
| 3481 | gatgtaaccc actcgtgcac ccaactgatc ttcagcatct tttactttca ccagcgtttc |
| 3541 | tgggtgagca aaaacaggaa ggcaaaatgc cgcaaaaaag ggaataaggg cgacacggaa |
| 3601 | atgttgaata ctcatactct tcctttttca atattattga agcatttatc agggttattg |
| 3661 | tctcatgagc ggatacatat ttgaatgtat ttagaaaaat aaacaaatag gggttccgcg |
| 3721 | cacatttccc cgaaaagtgc cacctgacgt ctaagaaacc attattatca tgacattaac |
| 3781 | ctataaaaat aggcgtatca cgaggccctt tcgtc // |

[0952] Plasmids for characterizing PAM (pU6-IB20_CRISPR_PAMcont(−) and pU6-IB20_CRISPR_PAMlib(+)) are shown in FIGS. 105 and 106. Sequences and features are below.

pU6-IB20_CRISPR_PAMcont(−)

| | |
|---|---|
| misc_feature | 1 . . . 30 |
| | /label = Overhung |
| primer_bind | 1 . . . 30 |
| | /label = Vector.REV |
| primer_bind | 1 . . . 22 |
| | /label = Vector.FOR |
| promoter | 14 . . . 343 |
| | /label = SV40 promoter |
| | /note = “SV40 enhancer and early promoter” |
| rep_origin | 194 . . . 329 |
| | /label = SV40 ori |
| | /note = “SV40 origin of replication” |
| primer_bind | complement(235 . . . 256) |
| | /label = Primer 738 |
| primer_bind | complement(329 . . . 348) |
| | /label = Primer 1 |
| poly A_signal | 349 . . . 470 |
| | /label = SV40 poly(A) signal |
| | /note = “SV40 polyadenylation signal” |
| primer_bind | 349 . . . 373 |
| | /label = Primer 2 |
| primer_bind | complement(519 . . . 535) |
| | /label = M13 rev |
| | /note = “common sequencing primer, one of multiple similar |
| | variants” |
| protein_bind | 543 . . . 559 |
| | /label = lac operator |
| | /bound_moiety = “lac repressor encoded by lacI” |
| | /note = “The lac repressor binds to the lac operator to |
| | inhibit transcription in E. coli. This inhibition can be |
| | relieved by adding lactose or |
| | isopropyl-beta-D-thiogalactopyranoside (IPTG).” |
| promoter | complement(567 . . . 597) |
| | /label = lac promoter |
| | /note = “promoter for the E. coli lac operon” |
| protein_bind | 612 . . . 633 |
| | /label = CAP binding site |
| | /bound_moiety = “E. coli catabolite activator protein” |
| | /note = “CAP binding activates transcription in the presence |
| | of cAMP.” |
| rep_origin | complement(921 . . . 1506) |
| | /direction = LEFT |
| | /label = ori |
| | /note = “high-copy-number ColE1/pMB1/pBR322/pUC origin of |
| | replication” |
| CDS | complement(1677 . . . 2537) |
| | /codon_start = 1 |
| | /gene = “bla” |
| | /product = “beta-lactamase” |
| primer_bind | 2427 . . . 2447 |
| | /label = Primer 261 |
| promoter | complement(2538 . . . 2642) |
| | /gene = “bla” |
| | /label = AmpR promoter |
| misc_feature | 2643 . . . 2667 |
| | /label = Overhung |
| primer_bind | complement(2645 . . . 2667) |
| | /label = Vector.FOR |
| promoter | 2668 . . . 2908 |
| | /label = U6 promoter |
| | /note = “RNA polymerase III promoter for human U6 snRNA” |
| primer_bind | 2668 . . . 2688 |
| | /label = hU6-F |
| | /note = “Human U6 promoter, forward primer” |
| primer_bind | 2839 . . . 2858 |
| | /label = LKO.1 5′ |
| | /note = “Human U6 promoter, forward primer” |
| misc_feature | 2879 . . . 2908 |
| | /label = Overhung |
| primer_bind | complement(2883 . . . 2908) |
| | /label = Vector.REV |
| misc_feature | 2909 . . . 2944 |
| | /label = IB20-DR |
| misc_feature | 2980 . . . 3015 |
| | /label = IB20-DR |
| misc_feature | 3016 . . . 3021 |
| | /label = U6 terminator |

(SEQ ID NO: 100)

| | |
|---|---|
| 1 | aattctgtgg aatgtgtgtc agttagggtg tggaaagtcc ccaggctccc cagcaggcag |
| 61 | aagtatgcaa agcatgcatc tcaattagtc agcaaccagg tgtggaaagt ccccaggctc |
| 121 | cccagcaggc agaagtatgc aaagcatgca tctcaattag tcagcaacca tagtcccgcc |
| 181 | cctaactccg cccatcccgc ccctaactcc gcccagttcc gcccattctc cgccccatgg |
| 241 | ctgactaatt ttttttattt atgcagaggc cgaggccgcc tctgcctctg agctattcca |
| 301 | gaagtagtga ggaggctttt ttggaggcct aggcttttgc aaaaagctaa cttgtttatt |
| 361 | gcagcttata atggttacaa ataaagcaat agcatcacaa atttcacaaa taaagcattt |
| 421 | ttttcactgc attctagttg tggtttgtcc aaactcatca atgtatctta tcatgtctgt |
| 481 | ataccgtcga cctctagcta gagcttggcg taatcatggt catagctgtt tcctgtgtga |
| 541 | aattgttatc cgctcacaat tccacacaac atacgagccg gaagcataaa gtgtaaagcc |
| 601 | tggggtgcct aatgagtgag ctaactcaca ttaattgcgt tgcgctcact gcccgctttc |
| 661 | cagtcgggaa acctgtcgtg ccagctgcat taatgaatcg gccaacgcgc ggggagaggc |
| 721 | ggtttgcgta ttgggcgctc ttccgcttcc tcgctcactg actcgctgcg ctcggtcgtt |
| 781 | cggctgcggc gagcggtatc agctcactca aaggcggtaa tacggttatc cacagaatca |
| 841 | ggggataacg caggaaagaa catgtgagca aaaggccagc aaaaggccag gaaccgtaaa |
| 901 | aaggccgcgt tgctggcgtt tttccatagg ctccgccccc ctgacgagca tcacaaaaat |
| 961 | cgacgctcaa gtcagaggtg gcgaaacccg acaggactat aaagatacca ggcgtttccc |
| 1021 | cctggaagct ccctcgtgcg ctctcctgtt ccgaccctgc cgcttaccgg atacctgtcc |
| 1081 | gcctttctcc cttcgggaag cgtggcgctt tctcatagct cacgctgtag gtatctcagt |
| 1141 | tcggtgtagg tcgttcgctc caagctgggc tgtgtgcacg aaccccccgt tcagcccgac |
| 1201 | cgctgcgcct tatccggtaa ctatcgtctt gagtccaacc cggtaagaca cgacttatcg |
| 1261 | ccactggcag cagccactgg taacaggatt agcagagcga ggtatgtagg cggtgctaca |
| 1321 | gagttcttga agtggtggcc taactacggc tacactagaa gaacagtatt tggtatctgc |
| 1381 | gctctgctga agccagttac cttcggaaaa agagttggta gctcttgatc cggcaaacaa |
| 1441 | accaccgctg gtagcggttt ttttgtttgc aagcagcaga ttacgcgcag aaaaaaagga |
| 1501 | tctcaagaag atcctttgat cttttctacg gggtctgacg ctcagtggaa cgaaaactca |
| 1561 | cgttaaggga ttttggtcat gagattatca aaaaggatct tcacctagat ccttttaaat |
| 1621 | taaaaatgaa gttttaaatc aatctaaagt atatatgagt aaacttggtc tgacagttac |
| 1681 | caatgcttaa tcagtgaggc acctatctca gcgatctgtc tatttcgttc atccatagtt |
| 1741 | gcctgactcc ccgtcgtgta gataactacg atacgggagg gcttaccatc tggccccagt |
| 1801 | gctgcaatga taccgcgaga cccacgctca ccggctccag atttatcagc aataaaccag |
| 1861 | ccagccggaa gggccgagcg cagaagtggt cctgcaactt tatccgcctc catccagtct |
| 1921 | attaattgtt gccgggaagc tagagtaagt agttcgccag ttaatagttt gcgcaacgtt |
| 1981 | gttgccattg ctacaggcat cgtggtgtca cgctcgtcgt ttggtatggc ttcattcagc |
| 2041 | tccggttccc aacgatcaag gcgagttaca tgatccccca tgttgtgcaa aaaagcggtt |
| 2101 | agctccttcg gtcctccgat cgttgtcaga agtaagttgg ccgcagtgtt atcactcatg |
| 2161 | gttatggcag cactgcataa ttctcttact gtcatgccat ccgtaagatg cttttctgtg |
| 2221 | actggtgagt actcaaccaa gtcattctga gaatagtgta tgcggcgacc gagttgctct |
| 2281 | tgcccggcgt caatacggga taataccgcg ccacatagca gaactttaaa agtgctcatc |
| 2341 | attggaaaac gttcttcggg gcgaaaactc tcaaggatct taccgctgtt gagatccagt |
| 2401 | tcgatgtaac ccactcgtgc acccaactga tcttcagcat cttttacttt caccagcgtt |
| 2461 | tctgggtgag caaaaacagg aaggcaaaat gccgcaaaaa agggaataag ggcgacacgg |
| 2521 | aaatgttgaa tactcatact cttccttttt caatattatt gaagcattta tcagggttat |
| 2581 | tgtctcatga gcggatacat atttgaatgt atttagaaaa ataaacaaat aggggttccg |
| 2641 | cgcacatttc cccgaaaagt gccacctgag ggcctatttc ccatgattcc ttcatatttg |
| 2701 | catatacgat acaaggctgt tagagagata attagaatta atttgactgt aaacacaaag |
| 2761 | atattagtac aaaatacgtg acgtagaaag taataatttc ttgggtagtt tgcagtttta |
| 2821 | aaattatgtt ttaaaatgga ctatcatatg cttaccgtaa cttgaaagta tttcgatttc |
| 2881 | ttggctttat atatcttgtg gaaaggacgt gagtcgtggc tttatgccgt taggcgttgc |
| 3001 | aaccatc tatgtatagc tacgatggaa tagtaaaggg tgagtcgtgg ctttatgccg |
| 3001 | ttaggcgttg ctcaattttt t // |

pU6-IB20_CRISPR_PAMlib(+)

| | |
|---|---|
| misc_feature | 1 . . . 30 |
| | /label = Overhung |
| primer_bind | 1 . . . 30 |
| | /label = Vector.REV |
| primer_bind | 1 . . . 22 |
| | /label = Vector.FOR |
| promoter | 14 . . . 343 |
| | /label = SV40 promoter |
| | /note = “SV40 enhancer and early promoter” |
| rep_origin | 194 . . . 329 |
| | /label = SV40 ori |
| | /note = “SV40 origin of replication” |
| primer_bind | complement(235 . . . 256) |
| | /label = Primer 738 |
| primer_bind | complement(329 . . . 348) |
| | /label = Primer 1 |
| polyA_signal | 349 . . . 470 |
| | /label = SV40 poly(A) signal |
| | /note = “SV40 polyadenylation signal” |
| primer_bind | 349 . . . 373 |
| | /label = Primer 2 |
| primer_bind | complement(519 . . . 535) |
| | /label = M13 rev |
| | /note = “common sequencing primer, one of multiple similar |
| | variants” |
| protein_bind | 543 . . . 559 |
| | /label = lac operator |
| | /bound_moiety = “lac repressor encoded by lacl” |
| | /note = “The lac repressor binds to the lac operator to |
| | inhibit transcription in E. coli. This inhibition can be |
| | relieved by adding lactose or |
| | isopropyl-beta-D-thiogalactopyranoside (IPTG).” |
| promoter | complement(567 . . . 597) |
| | /label = lac promoter |
| | /note = “promoter for the E. coli lac operon” |
| protein_bind | 612 . . . 633 |
| | /label = CAP binding site |
| | /bound_moiety = “E. coli catabolite activator protein” |
| | /note = “CAP binding activates transcription in the presence |
| | of cAMP.” |
| rep_origin | complement(921 . . . 1506) |
| | /direction = LEFT |
| | /label = ori |
| | /note = “high-copy-number ColE1/pMB1/pBR322/pUC origin of |
| | replication” |
| CDS | complement(1677 . . . 2537) |
| | /codon_start = 1 |
| | /gene = “bla” |
| | /product = “beta-lactamase” |
| | /label = AmpR |
| | /note = “confers resistance to ampicillin, carbenicillin, and |
| | related antibiotics” |
| | /translation = ″ |
| primer_bind | 2427 . . . 2447 |
| | /label = Primer 261 |
| promoter | complement(2538 . . . 2642) |
| | /gene = “bla” |
| | /label = AmpR promoter |
| misc_feature | 2643 . . . 2667 |
| | /label = Overhung |
| primer_bind | complement(2645 . . . 2667) |
| | /label = Vector.FOR |
| promoter | 2668 . . . 2908 |
| | /label = U6 promoter |
| | /note = “RNA polymerase III promoter for human U6 snRNA” |
| primer_bind | 2668 . . . 2688 |
| | /label = hU6-F |
| | /note = “Human U6 promoter, forward primer” |
| primer_bind | 2839 . . . 2858 |
| | /label = LKO.15′ |
| | /note = “Human U6 promoter, forward primer” |
| misc_feature | 2879 . . . 2908 |
| | /label = Overhung |
| primer_bind | complement(2883 . . . 2908) |
| | /label = Vector.REV |
| misc_feature | 2909 . . . 2944 |
| | /label = IB20-DR |
| misc_feature | 2980 . . . 3015 |
| | /label = IB20-DR |
| misc_feature | 3016 . . . 3021 |
| | /label = U6 terminator |

ORIGIN
(SEQ ID NO: 101)

| | |
|---|---|
| 1 | aattctgtgg aatgtgtgtc agttagggtg tggaaagtcc ccaggctccc cagcaggcag |
| 61 | aagtatgcaa agcatgcatc tcaattagtc agcaaccagg tgtggaaagt ccccaggctc |
| 121 | cccagcaggc agaagtatgc aaagcatgca tctcaattag tcagcaacca tagtcccgcc |
| 181 | cctaactccg cccatcccgc ccctaactcc gcccagttcc gcccattctc cgccccatgg |
| 241 | ctgactaatt ttttttattt atgcagaggc cgaggccgcc tctgcctctg agctattcca |
| 301 | gaagtagtga ggaggctttt ttggaggcct aggcttttgc aaaaagctaa cttgtttatt |
| 361 | gcagcttata atggttacaa ataaagcaat agcatcacaa atttcacaaa taaagcattt |
| 421 | ttttcactgc attctagttg tggtttgtcc aaactcatca atgtatctta tcatgtctgt |
| 481 | ataccgtcga cctctagcta gagcttggcg taatcatggt catagctgtt tcctgtgtga |
| 541 | aattgttatc cgctcacaat tccacacaac atacgagccg gaagcataaa gtgtaaagcc |
| 601 | tggggtgcct aatgagtgag ctaactcaca ttaattgcgt tgcgctcact gcccgctttc |
| 661 | cagtcgggaa acctgtcgtg ccagctgcat taatgaatcg gccaacgcgc ggggagaggc |
| 721 | ggtttgcgta ttgggcgctc ttccgcttcc tcgctcactg actcgctgcg ctcggtcgtt |
| 781 | cggctgcggc gagcggtatc agctcactca aaggcggtaa tacggttatc cacagaatca |
| 841 | ggggataacg caggaaagaa catgtgagca aaaggccagc aaaaggccag gaaccgtaaa |
| 901 | aaggccgcgt tgctggcgtt tttccatagg ctccgccccc ctgacgagca tcacaaaaat |
| 961 | cgacgctcaa gtcagaggtg gcgaaacccg acaggactat aaagatacca ggcgtttccc |
| 1021 | cctggaagct ccctcgtgcg ctctcctgtt ccgaccctgc cgcttaccgg atacctgtcc |
| 1081 | gcctttctcc cttcgggaag cgtggcgctt tctcatagct cacgctgtag gtatctcagt |
| 1141 | tcggtgtagg tcgttcgctc caagctgggc tgtgtgcacg aaccccccgt tcagcccgac |
| 1201 | cgctgcgcct tatccggtaa ctatcgtctt gagtccaacc cggtaagaca cgacttatcg |
| 1261 | ccactggcag cagccactgg taacaggatt agcagagcga ggtatgtagg cggtgctaca |
| 1321 | gagttcttga agtggtggcc taactacggc tacactagaa gaacagtatt tggtatctgc |
| 1381 | gctctgctga agccagttac cttcggaaaa agagttggta gctcttgatc cggcaaacaa |
| 1441 | accaccgctg gtagcggttt ttttgtttgc aagcagcaga ttacgcgcag aaaaaaagga |
| 1501 | tctcaagaag atcctttgat cttttctacg gggtctgacg ctcagtggaa cgaaaactca |
| 1561 | cgttaaggga ttttggtcat gagattatca aaaaggatct tcacctagat ccttttaaat |
| 1621 | taaaaatgaa gttttaaatc aatctaaagt atatatgagt aaacttggtc tgacagttac |
| 1681 | caatgcttaa tcagtgaggc acctatctca gcgatctgtc tatttcgttc atccatagtt |
| 1741 | gcctgactcc ccgtcgtgta gataactacg atacgggagg gcttaccatc tggccccagt |
| 1801 | gctgcaatga taccgcgaga cccacgctca ccggctccag atttatcagc aataaaccag |
| 1861 | ccagccggaa gggccgagcg cagaagtggt cctgcaactt tatccgcctc catccagtct |
| 1921 | attaattgtt gccgggaagc tagagtaagt agttcgccag ttaatagttt gcgcaacgtt |
| 1981 | gttgccattg ctacaggcat cgtggtgtca cgctcgtcgt ttggtatggc ttcattcagc |
| 2041 | tccggttccc aacgatcaag gcgagttaca tgatccccca tgttgtgcaa aaaagcggtt |
| 2101 | agctccttcg gtcctccgat cgttgtcaga agtaagttgg ccgcagtgtt atcactcatg |
| 2161 | gttatggcag cactgcataa ttctcttact gtcatgccat ccgtaagatg cttttctgtg |
| 2221 | actggtgagt actcaaccaa gtcattctga gaatagtgta tgcggcgacc gagttgctct |
| 2281 | tgcccggcgt caatacggga taataccgcg ccacatagca gaactttaaa agtgctcatc |
| 2341 | attggaaaac gttcttcggg gcgaaaactc tcaaggatct taccgctgtt gagatccagt |
| 2401 | tcgatgtaac ccactcgtgc acccaactga tcttcagcat cttttacttt caccagcgtt |
| 2461 | tctgggtgag caaaaacagg aaggcaaaat gccgcaaaaa agggaataag ggcgacacgg |
| 2521 | aaatgttgaa tactcatact cttccttttt caatattatt gaagcattta tcagggttat |
| 2581 | tgtctcatga gcggatacat atttgaatgt atttagaaaa ataaacaaat aggggttccg |
| 2641 | cgcacatttc cccgaaaagt gccacctgag ggcctatttc ccatgattcc ttcatatttg |
| 2701 | catatacgat acaaggctgt tagagagata attagaatta atttgactgt aaacacaaag |
| 2761 | atattagtac aaaatacgtg acgtagaaag taataatttc ttgggtagtt tgcagtttta |
| 2821 | aaattatgtt ttaaaatgga ctatcatatg cttaccgtaa cttgaaagta tttcgatttc |
| 2881 | ttggctttat atatcttgtg gaaaggacgt gagtcgtggc tttatgccgt taggcgttgc |
| 3001 | agagaag tcatttaata aggccactgt taaacgtagg tgagtcgtgg ctttatgccg |
| 3001 | ttaggcgttg ctcaatttttt // |

### Example 20

[0953] Example CAST 1-b T24 characterization in bacteria is summarized in FIG. 107. In this example, when the system comprises TnsD2, the donor polynucleotide may be inserted by the Tn7 transposase polypeptides without Cas proteins. In such cases, the target sequence on the locus of the Tn7 transposase, e.g., next to glmS gene. When the system comprises TnsD1, the donor polynucleotide may be inserted by CAST, i.e., Tn7 transposase polypeptides guided by the Cas protein and guide molecule. In such cases, the target sequence can be any sequence determined by the specificity of the Cas protein and the guide molecule. The Cas protein and the guide molecule may be designed to insert the donor to a desired target sequence.

[0954] Applicants tested T24 CAST function in targeting plasmids in mammalian cells. Plasmids expressing the transposases, Cas proteins, guide molecules, as well as plasmids providing donor polynucleotide and target sequences were co-transfected to 293FT cells. After 2 days, DNA was extracted from the cells by QE/mini-prep and insertion of donor polynucleotide in the target sequence was determined by PCR and next generation sequencing. The plasmids design and results were shown in FIG. 108.

[0955] PAM was screened for T24 CAST. Plasmids expressing transposases and guide molecules and plasmids providing donor polynucleotides and target sequences with PAM libraries were co-transfected in 293FT cells. PAM was screened and result is shown in FIG. 109.

[0956] New functional CAST orthologs (IB29 and IB18) were identified by PAM screening (FIG. 110). IB29 is the same as IB28 described herein.

[0957] Two subtypes of Type 1-b CAST were identified. The system of one of the subtypes (e.g., IB20) comprises a transposases that has activities of both TnsA and TnsB in a typical Tn7 system (e.g., shown as tnsAB in IB20) (FIG. 111). FIG. 112 shows example type I-b CAST loci. Four of these systems (T24, IB29, IB18, and IB20) were found to be able to target plasmids in mammalian cells.

[0958] NLSs were fused to the components of example Type I-b CAST systems and the subcellular localization of the components were tested by immunofluorescence (FIGS. 113A-113B).

[0959] Copy numbers of the plasmids needed for the T24 system to be active were tested (FIG. 114A-114B). Applicants also tested targeting LINE1-ORF2 by each of the four example CAST systems with 24 guide molecules (FIG. 115).

[0960] Applicants tested the activity of the example CAST-1b systems in targeting super-coiled (plasmids) and linear DNA. The CAST systems were active in targeting both super coiled and linear DNA targets (FIG. 116). Applicants further tested the effect of target site positions on the activity of the CAST-1b systems. Different sizes of the target sequences were tested, including linear targets comprising up to 300 bp upstream (5′ of PAM) and linear targets comprising up to 348 bp downstream (3′ of PAM) (FIG. 117). The minimal fragment size for Type I-b CAST function in 293FT cells (FIG. 118).

[0961] Nucleosome accessibility of the Cas proteins in the Type I-b CAST systems was tested by transcription activation assay as described in Pickar-Oliver et al. Nat. Biotechnol. 37, 1493-1501 (2019) (FIGS. 119-120). In another test, the individual Cas proteins in IB20 was fused with p300 and the transcription activation was tested (FIGS. 121-122).

[0962] Chimeric Type I-b CAST systems were tested. In this example, the chimeric systems comprise some components derived from a first species and other components derived from a second species different from the first species. FIG. 123 shows an example chimeric CAST system. The activities of the chimeric CAST systems in plasmid targeting in mammalian cells were tested (FIG. 124), and the insertion positions were determined (FIG. 125). In some of the examples, including the TnsD1 from both orthologs had an impact of the activity of the chimeric CAST (FIGS. 126 and 127).

### Example 21

[0963] The activities of the CAST systems with new NLSs in plasmid targeting were tested (FIG. 128 for T24; FIG. 129 for IB29; FIG. 130 for IB18).

### Example 22

[0964] This example shows targeting endogenous LINE1 gene in human cells. C1320 CAST components were introduced to human cells and insertion at endogenous LINE1 gene was tested by sequencing. Both LE and RE side junctions were checked by NGS. 5 bp difference for peak position was observed, suggesting the insertion was mediated by Tn7. Two different guides were used and both were able to direct insertion at the endogenous LINE1 gene (FIGS. 131A-131B).

### Example 23

[0965] This example shows targeting non-repetitive regions, e.g., EMX1, DNMT1, SLC35A2, and VEGFA by example CAST components. FIG. 132A shows targeting endogenous EMX1, DNMT1, SLC35A2 and VEGFA, and LE side genome-insertion junction confirmation by next generation sequencing. FIG. 132B shows confirmation for RE side. A 5 bp prominent peak shift between the measurement from LE and RE was generally observed, which suggested target site duplication (TSD). FIG. 132C shows the sequence reads of genome-insertion junction boundaries including target site duplication.

[0966] The spacers and expression vectors sequence information used in the experiment are shown below.

TABLE 10

| Plasmid | |
|---|---|
| name | Sequence (5′ to 3′) |
| IB20_pCM | CGTTACATAACTTACGGTAAATGGCCCGCCTGGCTGACCGCCCAACGACCCCCGCCCATTGAC |
| V-HA- | GTCAATAATGACGTATGTTCCCATAGTAACGCCAATAGGGACTTTCCATTGACGTCAATGGGT |
| NLS-Cas5 | GGAGTATTTACGGTAAACTGCCCACTTGGCAGTACATCAAGTGTATCATATGCCAAGTACGCC |
| | CCCTATTGACGTCAATGACGGTAAATGGCCCGCCTGGCATTATGCCCAGTACATGACCTTATG |
| | GGACTTTCCTACTTGGCAGTACATCTACGTATTAGTCATCGCTATTACCATGGTGATGCGGTTT |
| | TGGCAGTACATCAATGGGCGTGGATAGCGGTTTGACTCACGGGGATTTCCAAGTCTCCACCCC |
| | ATTGACGTCAATGGGAGTTTGTTTTGGCACCAAAATCAACGGGACTTTCCAAAATGTCGTAAC |
| | AACTCCGCCCCATTGACGCAAATGGGCGGTAGGCGTGTACGGTGGGAGGTCTATATAAGCAG |
| | AGCTGGTTTAGTGAACCGTCAGATCCGCTAGCGCTACCGGACTCAGATCGCCACCATGTACCC |
| | CTACGACGTGCCAGACTACGCCCCTAAGAAGAAGAGAAAAGTCGGCGGCTCTGGCGGCGGA |
| | GGATCTGGCGGAGGTGGAAGCGGAGGAATCGCCCCTCTGATCCTGTACCTGGACGTGCCCTT |
| | CACCACCTTCAGAGAGTCTCACGCCAGAGAGATGGGCAAGACATACCCCGTTCCTCCACCAG |
| | CCACAGTGTACGGCATGCTGCTGTCTCTCGTGGGCGAGACAAACGTGTACAGACACTGCGGC |
| | GTGGAACTGGCCATTGCCATGCTGAGCAGCCCCAAGAAGTCCCGGATCCTGCGGCAGATGCG |
| | GAGATTCAAGAACGCCGACTTCTCTCACCCCGAGAACGTGATCCCTTGCTACCAAGAGATCCT |
| | GAGCAACCTGAAGTGCCTGATCTGGGTCCGAAGCGACGAGGAAAAGATCCAGCCTAGCCTGA |
| | GAGAGCGGATCCAGCTGGCCTTTGATCACCCTGAACTCGTCAGAAGATTCGGCTGCCTGTTCC |
| | TGGGCGAGAGCGACCAGCTGATCAAGACCATCAAGCTGGCCAGAGAGGACTACCTGGAAGG |
| | CGTTAGACAGTGGGCCATCCGGGACAACAGAGGCAGACTGACACTGCCCTATTGGGTCGACC |
| | ACGTGGGCAGCAGAAATACCCGGTTCCTGAGATACCGGATCGAGGAAATGGACCGGCTGAGC |
| | CCTCCTGACCTGGCTTGGACAATGGTGCAGAGCCCCATCTGACTAGCATAACCCCTTGGGGCG |
| | CACTCCTCAGGTGCAGGCTGCCTATCAGAAGGTGGTGGCTGGTGTGGCCAATGCCCTGGCTCA |
| | CAAATACCACTGAGATCTTTTTCCCTCTGCCAAAAATTATGGGGACATCATGAAGCCCCTTGA |
| | GCATCTGACTTCTGGCTAATAAAGGAAATTTATTTTCATTGCAATAGTGTGTTGGAATTTTTTG |
| | TGTCTCTCACTCGGAAGGACATATGGGAGGGCAAATCATTTAAAACATCAGAATGAGTATTT |
| | GGTTTAGAGTTTGGCAACATATGCCCATATGCTGGCTGCCATGAACAAAGGTTGGCTATAAA |
| | GAGGTCATCAGTATATGAAACAGCCCCCTGCTGTCCATTCCTTATTCCATAGAAAAGCCTTGA |
| | CTTGAGGTTAGATTTTTTTTATATTTTGTTTTGTGTTATTTTTTTCTTTAACATCCCTAAAATTTT |
| | CCTTACATGTTTTACTAGCCAGATTTTTCCTCCTCTCCTGACTACTCCCAGTCATAGCTGTCCC |
| | TCTTCTCTTATGGAGATCCCTCGACCTGCAGCCCAAGCTTGGCGTAATCATGGTCATAGCTGT |
| | TTCCTGTGTGAAATTGTTATCCGCTCACAATTCCACACAACATACGAGCCGGAAGCATAAAGT |
| | GTAAAGCCTGGGGTGCCTAATGAGTGAGCTAACTCACATTAATTGCGTTGCGCTCACTGCCCG |
| | CTTTCCAGTCGGGAAACCTGTCGTGCCAGCGGATCCGCATCTCAATTAGTCAGCAACCATAGT |
| | CCCGCCCCTAACTCCGCCCATCCCGCCCCTAACTCCGCCCAGTTCCGCCCATTCTCCGCCCCAT |
| | GGCTGACTAATTTTTTTTATTTATGCAGAGGCCGAGGCCGCCTCGGCCTCTGAGCTATTCCAG |
| | AAGTAGTGAGGAGGCTTTTTTGGAGGCCTAGGCTTTTGCAAAAAGCTAACTTGTTTATTGCAG |
| | CTTATAATGGTTACAAATAAAGCAATAGCATCACAAATTTCACAAATAAAGCATTTTTTTCAC |
| | TGCATTCTAGTTGTGGTTTGTCCAAACTCATCAATGTATCTTATCATGTCTGGATCCGCTGCAT |
| | TAATGAATCGGCCAACGCGCGGGGAGAGGCGGTTTGCGTATTGGGCGCTCTTCCGCTTCCTCG |
| | CTCACTGACTCGCTGCGCTCGGTCGTTCGGCTGCGGCGAGCGGTATCAGCTCACTCAAAGGCG |
| | GTAATACGGTTATCCACAGAATCAGGGGATAACGCAGGAAAGAACATGTGAGCAAAAGGCC |
| | AGCAAAAGGCCAGGAACCGTAAAAAGGCCGCGTTGCTGGCGTTTTTCCATAGGCTCCGCCCC |
| | CCTGACGAGCATCACAAAAATCGACGCTCAAGTCAGAGGTGGCGAAACCCGACAGGACTATA |
| | AAGATACCAGGCGTTTCCCCCTGGAAGCTCCCTCGTGCGCTCTCCTGTTCCGACCCTGCCGCT |
| | TACCGGATACCTGTCCGCCTTTCTCCCTTCGGGAAGCGTGGCGCTTTCTCATAGCTCACGCTGT |
| | AGGTATCTCAGTTCGGTGTAGGTCGTTCGCTCCAAGCTGGGCTGTGTGCACGAACCCCCCGTT |
| | CAGCCCGACCGCTGCGCCTTATCCGGTAACTATCGTCTTGAGTCCAACCCGGTAAGACACGAC |
| | TTATCGCCACTGGCAGCAGCCACTGGTAACAGGATTAGCAGAGCGAGGTATGTAGGCGGTGC |
| | TACAGAGTTCTTGAAGTGGTGGCCTAACTACGGCTACACTAGAAGAACAGTATTTGGTATCTG |
| | CGCTCTGCTGAAGCCAGTTACCTTCGGAAAAAGAGTTGGTAGCTCTTGATCCGGCAAACAAA |
| | CCACCGCTGGTAGCGGTGGTTTTTTTGTTTGCAAGCAGCAGATTACGCGCAGAAAAAAAGGA |
| | TCTCAAGAAGATCCTTTGATCTTTTCTACGGGGTCTGACGCTCAGTGGAACGAAAACTCACGT |
| | TAAGGGATTTTGGTCATGAGATTATCAAAAAGGATCTTCACCTAGATCCTTTTAAATTAAAAA |
| | TGAAGTTTTAAATCAATCTAAAGTATATATGAGTAAACTTGGTCTGACAGTTACCAATGCTTA |
| | ATCAGTGAGGCACCTATCTCAGCGATCTGTCTATTTCGTTCATCCATAGTTGCCTGACTCCCCG |
| | TCGTGTAGATAACTACGATACGGGAGGGCTTACCATCTGGCCCCAGTGCTGCAATGATACCG |
| | CGAGACCCACGCTCACCGGCTCCAGATTTATCAGCAATAAACCAGCCAGCCGGAAGGGCCGA |
| | GCGCAGAAGTGGTCCTGCAACTTTATCCGCCTCCATCCAGTCTATTAATTGTTGCCGGGAAGC |
| | TAGAGTAAGTAGTTCGCCAGTTAATAGTTTGCGCAACGTTGTTGCCATTGCTACAGGCATCGT |
| | GGTGTCACGCTCGTCGTTTGGTATGGCTTCATTCAGCTCCGGTTCCCAACGATCAAGGCGAGT |
| | TACATGATCCCCCATGTTGTGCAAAAAAGCGGTTAGCTCCTTCGGTCCTCCGATCGTTGTCAG |
| | AAGTAAGTTGGCCGCAGTGTTATCACTCATGGTTATGGCAGCACTGCATAATTCTCTTACTGT |
| | CATGCCATCCGTAAGATGCTTTTCTGTGACTGGTGAGTACTCAACCAAGTCATTCTGAGAATA |
| | GTGTATGCGGCGACCGAGTTGCTCTTGCCCGGCGTCAATACGGGATAATACCGCGCCACATA |
| | GCAGAACTTTAAAAGTGCTCATCATTGGAAAACGTTCTTCGGGGCGAAAACTCTCAAGGATC |
| | TTACCGCTGTTGAGATCCAGTTCGATGTAACCCACTCGTGCACCCAACTGATCTTCAGCATCT |
| | TTTACTTTCACCAGCGTTTCTGGGTGAGCAAAAACAGGAAGGCAAAATGCCGCAAAAAAGGG |
| | AATAAGGGCGACACGGAAATGTTGAATACTCATACTCTTCCTTTTTCAATATTATTGAAGCAT |
| | TTATCAGGGTTATTGTCTCATGAGCGGATACATATTTGAATGTATTTAGAAAAATAAACAAAT |
| | AGGGGTTCCGCGCACATTTCCCCGAAAAGTGCCACCTGGGTCGACATTGATTATTGACTAGTA |
| | ATAGTAATCAATTACGGGGTCATTAGTTCATAGCCCATATATGGAGTTCCG (SEQ ID NO: 363) |
| IB20_pCM | CGTTACATAACTTACGGTAAATGGCCCGCCTGGCTGACCGCCCAACGACCCCCGCCCATTGAC |
| V-HA- | GTCAATAATGACGTATGTTCCCATAGTAACGCCAATAGGGACTTTCCATTGACGTCAATGGGT |
| NLS-Cas6 | GGAGTATTTACGGTAAACTGCCCACTTGGCAGTACATCAAGTGTATCATATGCCAAGTACGCC |
| | CCCTATTGACGTCAATGACGGTAAATGGCCCGCCTGGCATTATGCCCAGTACATGACCTTATG |
| | GGACTTTCCTACTTGGCAGTACATCTACGTATTAGTCATCGCTATTACCATGGTGATGCGGTTT |
| | TGGCAGTACATCAATGGGCGTGGATAGCGGTTTGACTCACGGGGATTTCCAAGTCTCCACCCC |
| | ATTGACGTCAATGGGAGTTTGTTTTGGCACCAAAATCAACGGGACTTTCCAAAATGTCGTAAC |
| | AACTCCGCCCCATTGACGCAAATGGGCGGTAGGCGTGTACGGTGGGAGGTCTATATAAGCAG |
| | AGCTGGTTTAGTGAACCGTCAGATCCGCTAGCGCTACCGGACTCAGATCGCCACCATGTACCC |
| | CTACGACGTGCCAGACTACGCCCCTAAGAAGAAGAGAAAAGTCGGCGGCTCTGGCGGCGGA |
| | GGATCTGGCGGAGGTGGAAGCGGAGGAACCGCCATCCTGATCCAGAGCGAGGAATACGTGG |
| | ACCTGACCTTCAAGCTGAGAGGCGCCCCTATTCCTCTGGACAACGGCTACCTGACATACGCCG |
| | CTCTGAGCAGAATCTGCCCTCCTCTGCACGAACTGAAGTCCATCGGCATTCACCCTATCGCCG |
| | GCATTCCCACCAGAAACAACCTGCTGGAACTGACAGCCCAGAGCCGGCTGAAGATCAGAATC |
| | TACCACCAGCAGATCCCTCTGATCTACCCCTACCTGGCCGGACAGGCCTTTCACATCGGCCAG |
| | AACTTCTACCAGCTGGACATCCCCGACTACAAGCCCCTGATCAGCAGCGAGAGCGTGTACAG |
| | CAGACTGGTCATCATCAAGGGCTTCCAGGACAGCACCAACTTCATCGAGGCCGTGCAGCGGC |
| | AGATGGACAATCTGGGAATCCAGGGCAAGATCGAGCTGCTGACCAGACAGGATGGCACCCCT |
| | CAGAGAAGGCAGCTGACCATCAACAAAGAGGGCAAGCAGTTCAAAGTGCGCGGCTTCGGCG |
| | TGAAGATCTCCGAGCTGAACCCTGAGGACAGCCTGACACTGCAAGAGCAAGGCATCGGCGGC |
| | AAGCGGAAGATGATGTGCGGCATCTTTGTGCCCGCCACCAGATCCAAAGAGGAAGAGGAAA |
| | CCTGACTAGCATAACCCCTTGGGGCGCACTCCTCAGGTGCAGGCTGCCTATCAGAAGGTGGT |
| | GGCTGGTGTGGCCAATGCCCTGGCTCACAAATACCACTGAGATCTTTTTCCCTCTGCCAAAAA |
| | TTATGGGGACATCATGAAGCCCCTTGAGCATCTGACTTCTGGCTAATAAAGGAAATTTATTTT |
| | CATTGCAATAGTGTGTTGGAATTTTTTGTGTCTCTCACTCGGAAGGACATATGGGAGGGCAAA |
| | TCATTTAAAACATCAGAATGAGTATTTGGTTTAGAGTTTGGCAACATATGCCCATATGCTGGC |
| | TGCCATGAACAAAGGTTGGCTATAAAGAGGTCATCAGTATATGAAACAGCCCCCTGCTGTCC |
| | ATTCCTTATTCCATAGAAAAGCCTTGACTTGAGGTTAGATTTTTTTTATATTTTGTTTTGTGTTA |
| | TTTTTTTCTTTAACATCCCTAAAATTTTCCTTACATGTTTTACTAGCCAGATTTTTCCTCCTCTC |
| | CTGACTACTCCCAGTCATAGCTGTCCCTCTTCTCTTATGGAGATCCCTCGACCTGCAGCCCAA |
| | GCTTGGCGTAATCATGGTCATAGCTGTTTCCTGTGTGAAATTGTTATCCGCTCACAATTCCACA |
| | CAACATACGAGCCGGAAGCATAAAGTGTAAAGCCTGGGGTGCCTAATGAGTGAGCTAACTCA |
| | CATTAATTGCGTTGCGCTCACTGCCCGCTTTCCAGTCGGGAAACCTGTCGTGCCAGCGGATCC |
| | GCATCTCAATTAGTCAGCAACCATAGTCCCGCCCCTAACTCCGCCCATCCCGCCCCTAACTCC |
| | GCCCAGTTCCGCCCATTCTCCGCCCCATGGCTGACTAATTTTTTTTATTTATGCAGAGGCCGAG |
| | GCCGCCTCGGCCTCTGAGCTATTCCAGAAGTAGTGAGGAGGCTTTTTTGGAGGCCTAGGCTTT |
| | TGCAAAAAGCTAACTTGTTTATTGCAGCTTATAATGGTTACAAATAAAGCAATAGCATCACAA |
| | ATTTCACAAATAAAGCATTTTTTTCACTGCATTCTAGTTGTGGTTTGTCCAAACTCATCAATGT |
| | ATCTTATCATGTCTGGATCCGCTGCATTAATGAATCGGCCAACGCGCGGGGAGAGGCGGTTTG |
| | CGTATTGGGCGCTCTTCCGCTTCCTCGCTCACTGACTCGCTGCGCTCGGTCGTTCGGCTGCGGC |
| | GAGCGGTATCAGCTCACTCAAAGGCGGTAATACGGTTATCCACAGAATCAGGGGATAACGCA |
| | GGAAAGAACATGTGAGCAAAAGGCCAGCAAAAGGCCAGGAACCGTAAAAAGGCCGCGTTGC |
| | TGGCGTTTTTCCATAGGCTCCGCCCCCCTGACGAGCATCACAAAAATCGACGCTCAAGTCAGA |
| | GGTGGCGAAACCCGACAGGACTATAAAGATACCAGGCGTTTCCCCCTGGAAGCTCCCTCGTG |
| | CGCTCTCCTGTTCCGACCCTGCCGCTTACCGGATACCTGTCCGCCTTTCTCCCTTCGGGAAGCG |
| | TGGCGCTTTCTCATAGCTCACGCTGTAGGTATCTCAGTTCGGTGTAGGTCGTTCGCTCCAAGCT |
| | GGGCTGTGTGCACGAACCCCCCGTTCAGCCCGACCGCTGCGCCTTATCCGGTAACTATCGTCT |
| | TGAGTCCAACCCGGTAAGACACGACTTATCGCCACTGGCAGCAGCCACTGGTAACAGGATTA |
| | GCAGAGCGAGGTATGTAGGCGGTGCTACAGAGTTCTTGAAGTGGTGGCCTAACTACGGCTAC |
| | ACTAGAAGAACAGTATTTGGTATCTGCGCTCTGCTGAAGCCAGTTACCTTCGGAAAAAGAGTT |
| | GGTAGCTCTTGATCCGGCAAACAAACCACCGCTGGTAGCGGTGGTTTTTTTGTTTGCAAGCAG |
| | CAGATTACGCGCAGAAAAAAAGGATCTCAAGAAGATCCTTTGATCTTTTCTACGGGGTCTGA |
| | CGCTCAGTGGAACGAAAACTCACGTTAAGGGATTTTGGTCATGAGATTATCAAAAAGGATCT |
| | TCACCTAGATCCTTTTAAATTAAAAATGAAGTTTTAAATCAATCTAAAGTATATATGAGTAAA |
| | CTTGGTCTGACAGTTACCAATGCTTAATCAGTGAGGCACCTATCTCAGCGATCTGTCTATTTC |
| | GTTCATCCATAGTTGCCTGACTCCCCGTCGTGTAGATAACTACGATACGGGAGGGCTTACCAT |
| | CTGGCCCCAGTGCTGCAATGATACCGCGAGACCCACGCTCACCGGCTCCAGATTTATCAGCA |
| | ATAAACCAGCCAGCCGGAAGGGCCGAGCGCAGAAGTGGTCCTGCAACTTTATCCGCCTCCAT |
| | CCAGTCTATTAATTGTTGCCGGGAAGCTAGAGTAAGTAGTTCGCCAGTTAATAGTTTGCGCAA |
| | CGTTGTTGCCATTGCTACAGGCATCGTGGTGTCACGCTCGTCGTTTGGTATGGCTTCATTCAGC |
| | TCCGGTTCCCAACGATCAAGGCGAGTTACATGATCCCCCATGTTGTGCAAAAAAGCGGTTAG |
| | CTCCTTCGGTCCTCCGATCGTTGTCAGAAGTAAGTTGGCCGCAGTGTTATCACTCATGGTTAT |
| | GGCAGCACTGCATAATTCTCTTACTGTCATGCCATCCGTAAGATGCTTTTCTGTGACTGGTGA |
| | GTACTCAACCAAGTCATTCTGAGAATAGTGTATGCGGCGACCGAGTTGCTCTTGCCCGGCGTC |
| | AATACGGGATAATACCGCGCCACATAGCAGAACTTTAAAAGTGCTCATCATTGGAAAACGTT |
| | CTTCGGGGCGAAAACTCTCAAGGATCTTACCGCTGTTGAGATCCAGTTCGATGTAACCCACTC |
| | GTGCACCCAACTGATCTTCAGCATCTTTTACTTTCACCAGCGTTTCTGGGTGAGCAAAAACAG |
| | GAAGGCAAAATGCCGCAAAAAAGGGAATAAGGGCGACACGGAAATGTTGAATACTCATACT |
| | CTTCCTTTTTCAATATTATTGAAGCATTTATCAGGGTTATTGTCTCATGAGCGGATACATATTT |
| | GAATGTATTTAGAAAAATAAACAAATAGGGGTTCCGCGCACATTTCCCCGAAAAGTGCCACC |
| | TGGGTCGACATTGATTATTGACTAGTAATAGTAATCAATTACGGGGTCATTAGTTCATAGCCC |
| | ATATATGGAGTTCCG (SEQ ID NO: 364) |
| IB20_pCM | CGTTACATAACTTACGGTAAATGGCCCGCCTGGCTGACCGCCCAACGACCCCCGCCCATTGAC |
| V-HA- | GTCAATAATGACGTATGTTCCCATAGTAACGCCAATAGGGACTTTCCATTGACGTCAATGGGT |
| NLS-Cas7 | GGAGTATTTACGGTAAACTGCCCACTTGGCAGTACATCAAGTGTATCATATGCCAAGTACGCC |
| | CCCTATTGACGTCAATGACGGTAAATGGCCCGCCTGGCATTATGCCCAGTACATGACCTTATG |
| | GGACTTTCCTACTTGGCAGTACATCTACGTATTAGTCATCGCTATTACCATGGTGATGCGGTTT |
| | TGGCAGTACATCAATGGGCGTGGATAGCGGTTTGACTCACGGGGATTTCCAAGTCTCCACCCC |
| | ATTGACGTCAATGGGAGTTTGTTTTGGCACCAAAATCAACGGGACTTTCCAAAATGTCGTAAC |
| | AACTCCGCCCCATTGACGCAAATGGGCGGTAGGCGTGTACGGTGGGAGGTCTATATAAGCAG |
| | AGCTGGTTTAGTGAACCGTCAGATCCGCTAGCGCTACCGGACTCAGATCGCCACCATGTACCC |
| | CTACGACGTGCCAGACTACGCCCCTAAGAAGAAGAGAAAAGTCGGCGGCTCTGGCGGCGGA |
| | GGATCTGGCGGAGGTGGAAGCGGAGGAATGACCCAGAAGAAGAACGACAGCAACATCCCCA |
| | ACTACTACCTGTACGGCACCGTGCTGACCAGATACGGACTGGCCAGCCTGAACCACGACATC |
| | AGAAGAGGCAACAAGACCATCCTGCAGAAAGGCTACTGGAACAACGGCAAGATCCACAGCT |
| | TCGTGGGCAGCAGCGCCATTAGATGGGCCCTGAGGTTCTATCTGCAGAAACAGGGCTACCTG |
| | GTCAACAGAGTGTGGGACGAAGAGGAACACATCAACAGACTGACCAGCGAGGACTTCGACC |
| | CCGAGAAGTTCTACGACGACGACATCTTCGGCTTCGCCCTGCTGGAAAGCGCCGAGACAGAG |
| | GAAGATACCAGCACCACCAAGCGGAAGAAGAAGCAGACCAAGACCAGCACACCCAACCAGA |
| | GAATGGGCGCCCTGGGCATGAATATGGCCGTGTCTCTGACCCCTTACGATGGCGCCGTGAAG |
| | CTGGGAGCCAAGTCTGGCAGAGAGAAGGACAGCACCAGCCTGCACTTCACCGAGTACCACGC |
| | CACCAGATACCAGTACTACTTCGGCATCGACGCCACACACCTGAAGGACTTCAGCCGGATCC |
| | TGCCTATGATCGACGGCATCATGAACCTGCCTAAAGTCGGCGGCAGCAGCAATATCTTCAACT |
| | ACCCTTTCTGCCCCGACAGCCTGGTGTTCCAGTGGACCAATCACTTCGCCAGCTACATCAGCT |
| | ACTGCTTCGAGTACTGCGACCCCAAGAGCAAAGAGGCCAAGCTGAGCCAAGAGTTCATCGAC |
| | GAGGTGGAATGCGGCCAGATCGACCCTAGCAAACTGTGGATCGGCGGCACCATCGTGAAGGA |
| | CCTGCAGCAGCTGGACAACTTCGAGAGCAGCCCTCTGAACAAGGCCCACATCTACCGGAACC |
| | GGAACGAGATGATCGAGGCCCTGAAAACCGTGATCAAGCGCGACCTGGGCCTCGAGGAATCC |
| | AAGTAACTAGCATAACCCCTTGGGGCGCACTCCTCAGGTGCAGGCTGCCTATCAGAAGGTGG |
| | TGGCTGGTGTGGCCAATGCCCTGGCTCACAAATACCACTGAGATCTTTTTCCCTCTGCCAAAA |
| | ATTATGGGGACATCATGAAGCCCCTTGAGCATCTGACTTCTGGCTAATAAAGGAAATTTATTT |
| | TCATTGCAATAGTGTGTTGGAATTTTTTGTGTCTCTCACTCGGAAGGACATATGGGAGGGCAA |
| | ATCATTTAAAACATCAGAATGAGTATTTGGTTTAGAGTTTGGCAACATATGCCCATATGCTGG |
| | CTGCCATGAACAAAGGTTGGCTATAAAGAGGTCATCAGTATATGAAACAGCCCCCTGCTGTC |
| | CATTCCTTATTCCATAGAAAAGCCTTGACTTGAGGTTAGATTTTTTTTATATTTTGTTTTGTGTT |
| | ATTTTTTTCTTTAACATCCCTAAAATTTTCCTTACATGTTTTACTAGCCAGATTTTTCCTCCTCT |
| | CCTGACTACTCCCAGTCATAGCTGTCCCTCTTCTCTTATGGAGATCCCTCGACCTGCAGCCCAA |
| | GCTTGGCGTAATCATGGTCATAGCTGTTTCCTGTGTGAAATTGTTATCCGCTCACAATTCCACA |
| | CAACATACGAGCCGGAAGCATAAAGTGTAAAGCCTGGGGTGCCTAATGAGTGAGCTAACTCA |
| | CATTAATTGCGTTGCGCTCACTGCCCGCTTTCCAGTCGGGAAACCTGTCGTGCCAGCGGATCC |
| | GCATCTCAATTAGTCAGCAACCATAGTCCCGCCCCTAACTCCGCCCATCCCGCCCCTAACTCC |
| | GCCCAGTTCCGCCCATTCTCCGCCCCATGGCTGACTAATTTTTTTTATTTATGCAGAGGCCGAG |
| | GCCGCCTCGGCCTCTGAGCTATTCCAGAAGTAGTGAGGAGGCTTTTTTGGAGGCCTAGGCTTT |
| | TGCAAAAAGCTAACTTGTTTATTGCAGCTTATAATGGTTACAAATAAAGCAATAGCATCACAA |
| | ATTTCACAAATAAAGCATTTTTTTCACTGCATTCTAGTTGTGGTTTGTCCAAACTCATCAATGT |
| | ATCTTATCATGTCTGGATCCGCTGCATTAATGAATCGGCCAACGCGCGGGGAGAGGCGGTTTG |
| | CGTATTGGGCGCTCTTCCGCTTCCTCGCTCACTGACTCGCTGCGCTCGGTCGTTCGGCTGCGGC |
| | GAGCGGTATCAGCTCACTCAAAGGCGGTAATACGGTTATCCACAGAATCAGGGGATAACGCA |
| | GGAAAGAACATGTGAGCAAAAGGCCAGCAAAAGGCCAGGAACCGTAAAAAGGCCGCGTTGC |
| | TGGCGTTTTTCCATAGGCTCCGCCCCCCTGACGAGCATCACAAAAATCGACGCTCAAGTCAGA |
| | GGTGGCGAAACCCGACAGGACTATAAAGATACCAGGCGTTTCCCCCTGGAAGCTCCCTCGTG |
| | CGCTCTCCTGTTCCGACCCTGCCGCTTACCGGATACCTGTCCGCCTTTCTCCCTTCGGGAAGCG |
| | TGGCGCTTTCTCATAGCTCACGCTGTAGGTATCTCAGTTCGGTGTAGGTCGTTCGCTCCAAGCT |
| | GGGCTGTGTGCACGAACCCCCCGTTCAGCCCGACCGCTGCGCCTTATCCGGTAACTATCGTCT |
| | TGAGTCCAACCCGGTAAGACACGACTTATCGCCACTGGCAGCAGCCACTGGTAACAGGATTA |
| | GCAGAGCGAGGTATGTAGGCGGTGCTACAGAGTTCTTGAAGTGGTGGCCTAACTACGGCTAC |
| | ACTAGAAGAACAGTATTTGGTATCTGCGCTCTGCTGAAGCCAGTTACCTTCGGAAAAAGAGTT |
| | GGTAGCTCTTGATCCGGCAAACAAACCACCGCTGGTAGCGGTGGTTTTTTTGTTTGCAAGCAG |
| | CAGATTACGCGCAGAAAAAAAGGATCTCAAGAAGATCCTTTGATCTTTTCTACGGGGTCTGA |
| | CGCTCAGTGGAACGAAAACTCACGTTAAGGGATTTTGGTCATGAGATTATCAAAAAGGATCT |
| | TCACCTAGATCCTTTTAAATTAAAAATGAAGTTTTAAATCAATCTAAAGTATATATGAGTAAA |
| | CTTGGTCTGACAGTTACCAATGCTTAATCAGTGAGGCACCTATCTCAGCGATCTGTCTATTTC |
| | GTTCATCCATAGTTGCCTGACTCCCCGTCGTGTAGATAACTACGATACGGGAGGGCTTACCAT |
| | CTGGCCCCAGTGCTGCAATGATACCGCGAGACCCACGCTCACCGGCTCCAGATTTATCAGCA |
| | ATAAACCAGCCAGCCGGAAGGGCCGAGCGCAGAAGTGGTCCTGCAACTTTATCCGCCTCCAT |
| | CCAGTCTATTAATTGTTGCCGGGAAGCTAGAGTAAGTAGTTCGCCAGTTAATAGTTTGCGCAA |
| | CGTTGTTGCCATTGCTACAGGCATCGTGGTGTCACGCTCGTCGTTTGGTATGGCTTCATTCAGC |
| | TCCGGTTCCCAACGATCAAGGCGAGTTACATGATCCCCCATGTTGTGCAAAAAAGCGGTTAG |
| | CTCCTTCGGTCCTCCGATCGTTGTCAGAAGTAAGTTGGCCGCAGTGTTATCACTCATGGTTAT |
| | GGCAGCACTGCATAATTCTCTTACTGTCATGCCATCCGTAAGATGCTTTTCTGTGACTGGTGA |
| | GTACTCAACCAAGTCATTCTGAGAATAGTGTATGCGGCGACCGAGTTGCTCTTGCCCGGCGTC |
| | AATACGGGATAATACCGCGCCACATAGCAGAACTTTAAAAGTGCTCATCATTGGAAAACGTT |
| | CTTCGGGGCGAAAACTCTCAAGGATCTTACCGCTGTTGAGATCCAGTTCGATGTAACCCACTC |
| | GTGCACCCAACTGATCTTCAGCATCTTTTACTTTCACCAGCGTTTCTGGGTGAGCAAAAACAG |
| | GAAGGCAAAATGCCGCAAAAAAGGGAATAAGGGCGACACGGAAATGTTGAATACTCATACT |
| | CTTCCTTTTTCAATATTATTGAAGCATTTATCAGGGTTATTGTCTCATGAGCGGATACATATTT |
| | GAATGTATTTAGAAAAATAAACAAATAGGGGTTCCGCGCACATTTCCCCGAAAAGTGCCACC |
| | TGGGTCGACATTGATTATTGACTAGTAATAGTAATCAATTACGGGGTCATTAGTTCATAGCCC |
| | ATATATGGAGTTCCG (SEQ ID NO: 365) |
| IB20_pCM | CGTTACATAACTTACGGTAAATGGCCCGCCTGGCTGACCGCCCAACGACCCCCGCCCATTGAC |
| V-HA- | GTCAATAATGACGTATGTTCCCATAGTAACGCCAATAGGGACTTTCCATTGACGTCAATGGGT |
| NLS-Cas8 | GGAGTATTTACGGTAAACTGCCCACTTGGCAGTACATCAAGTGTATCATATGCCAAGTACGCC |
| | CCCTATTGACGTCAATGACGGTAAATGGCCCGCCTGGCATTATGCCCAGTACATGACCTTATG |
| | GGACTTTCCTACTTGGCAGTACATCTACGTATTAGTCATCGCTATTACCATGGTGATGCGGTTT |
| | TGGCAGTACATCAATGGGCGTGGATAGCGGTTTGACTCACGGGGATTTCCAAGTCTCCACCCC |
| | ATTGACGTCAATGGGAGTTTGTTTTGGCACCAAAATCAACGGGACTTTCCAAAATGTCGTAAC |
| | AACTCCGCCCCATTGACGCAAATGGGCGGTAGGCGTGTACGGTGGGAGGTCTATATAAGCAG |
| | AGCTGGTTTAGTGAACCGTCAGATCCGCTAGCGCTACCGGACTCAGATCGCCACCATGTACCC |
| | CTACGACGTGCCAGACTACGCCCCTAAGAAGAAGAGAAAAGTCGGCGGCTCTGGCGGCGGA |
| | GGATCTGGCGGAGGTGGAAGCGGAGGAATCGTGTCCACACAGCCCAAGATCAGCCTGTCTCT |
| | GCACGCCGCCGATACCACCATCATGCACAGAGTGGGCATGACCGGCCTGTACATGACCCTGA |
| | AGCGGCTGGAAAAGCAGTACCCTCTGAGCAGACAGAGAGGCGGCCACATCAGCTGGTTTCTG |
| | ACCGCCGACACCATCGAGCTGTTTTGGGAGGGCAGCGACTTTATCGCCCTGAGCTGGCTGATC |
| | AACGAGAGCTTTCAGCTGGACGACACCGGCCTGATCCACCTCGTTGGCCTGGACAACGACCG |
| | GATCGACCTGAGACAGAAGATCCACATCCACGAGGGAATCTGCGGCGTGTTCCTGCGGCTGA |
| | ACAAGTTTTACCAGGCCGGCGAGATCATCAACACCGAGCTGAGATTCGAAGAGAAGCAGGTC |
| | GAGTACCAGTACAAGAGCCTGACTTGGTACGCCCACCAGACCTTCGCCGAGAAGCTGTGCGA |
| | AGCCGATACACAGCAGCTGCGGCACGACTACATCCAGATCACCAGCTGGCTGTACCTCGGCG |
| | GAATTGTGCGGCATGCCAGAACACAGAACACCACCAAGCTGGAAGAGAAACCCGAGTACGC |
| | CCTGGCTCTGCTGTTTGTGCCTGTCGTGTGCCACTACTGCCTGCTGCACATCCCTAGCGAGGA |
| | CCTGAAAGAGCGGAAGCCCCACAGATACCTGGTGGTCATCCCCGAGATCAAGGACTTCGAGG |
| | ATGCCAGCCAGAGAAGATGGCGGCTGCAGCAGCTGGAAACAAAGCAGTTCCACGTGTCCAGC |
| | CTGGGCGAAGCCGGCCTGCTGTACTACAGCCTGGATGACATTCAGCCCGAGGTGGCCTACTA |
| | CCAGGCCTGTCAAGTGTGGCTGTACGAAAAGACCAACAAGGCCAGCCGGCAGCGGACCCTGA |
| | TGAGCATCGAGGAAATCAAGATCGACAAGAACATCCTCATCACCTACCAGCAGGTCCAGAAG |
| | TACTTTAAGACCAACTACCAGATCATTAAGTACAAGCAGATCTTCATCAAAGTGAACCCCATT |
| | CGGAGCCTGATCGCCGACAATCTGGTCAAGGGAATCCACTGGTGGTCCAATTTCTGGGAGAA |
| | GCTGGTCATCGAGGACAGCAAAGAGTACCTGTTCAACCAGCTGTTCAGCAACCGCGAGGGCT |
| | TCATCATCATGGCCGAGAACAGCGAAGAGGACAAGCAGTATCTGATCTTTATCAAGGTGTTC |
| | CAGCAGGCCATGAAGGGCAACTTCGCCAAGATCTACGCCAAGACCGAGGAAGGCAAGGACC |
| | CTCCTATCAAGAAAAAGGTGGAACGGCTGCGGGCCGAGCTGAACTACTGTTACGATGAGCTG |
| | AGCTTCAAAGAATACCTGAGCGACTTCCTCGTCAGAGGCGGACTGAACAAATACTTCAACGA |
| | GCACCAAGAGGAAATCGCCCTGCTGATCAAGAAGTCCCCTTGGCAAGAGATCAGAATCTGGT |
| | CCCTGCTGGCCATTGCCAGCTACAAGCCCAAGGACAAGCTGACCAACCGGGACGATAGCAGC |
| | CTGAGCAACAACCAGAAACTGGAAGAAGTGAACGACGACAGCGAGGAAGAGTGACTAGCAT |
| | AACCCCTTGGGGCGCACTCCTCAGGTGCAGGCTGCCTATCAGAAGGTGGTGGCTGGTGTGGC |
| | CAATGCCCTGGCTCACAAATACCACTGAGATCTTTTTCCCTCTGCCAAAAATTATGGGGACAT |
| | CATGAAGCCCCTTGAGCATCTGACTTCTGGCTAATAAAGGAAATTTATTTTCATTGCAATAGT |
| | GTGTTGGAATTTTTTGTGTCTCTCACTCGGAAGGACATATGGGAGGGCAAATCATTTAAAACA |
| | TCAGAATGAGTATTTGGTTTAGAGTTTGGCAACATATGCCCATATGCTGGCTGCCATGAACAA |
| | AGGTTGGCTATAAAGAGGTCATCAGTATATGAAACAGCCCCCTGCTGTCCATTCCTTATTCCA |
| | TAGAAAAGCCTTGACTTGAGGTTAGATTTTTTTTATATTTTGTTTTGTGTTATTTTTTTCTTTAA |
| | CATCCCTAAAATTTTCCTTACATGTTTTACTAGCCAGATTTTTCCTCCTCTCCTGACTACTCCCA |
| | GTCATAGCTGTCCCTCTTCTCTTATGGAGATCCCTCGACCTGCAGCCCAAGCTTGGCGTAATC |
| | ATGGTCATAGCTGTTTCCTGTGTGAAATTGTTATCCGCTCACAATTCCACACAACATACGAGC |
| | CGGAAGCATAAAGTGTAAAGCCTGGGGTGCCTAATGAGTGAGCTAACTCACATTAATTGCGT |
| | TGCGCTCACTGCCCGCTTTCCAGTCGGGAAACCTGTCGTGCCAGCGGATCCGCATCTCAATTA |
| | GTCAGCAACCATAGTCCCGCCCCTAACTCCGCCCATCCCGCCCCTAACTCCGCCCAGTTCCGC |
| | CCATTCTCCGCCCCATGGCTGACTAATTTTTTTTATTTATGCAGAGGCCGAGGCCGCCTCGGCC |
| | TCTGAGCTATTCCAGAAGTAGTGAGGAGGCTTTTTTGGAGGCCTAGGCTTTTGCAAAAAGCTA |
| | ACTTGTTTATTGCAGCTTATAATGGTTACAAATAAAGCAATAGCATCACAAATTTCACAAATA |
| | AAGCATTTTTTTCACTGCATTCTAGTTGTGGTTTGTCCAAACTCATCAATGTATCTTATCATGT |
| | CTGGATCCGCTGCATTAATGAATCGGCCAACGCGCGGGGAGAGGCGGTTTGCGTATTGGGCG |
| | CTCTTCCGCTTCCTCGCTCACTGACTCGCTGCGCTCGGTCGTTCGGCTGCGGCGAGCGGTATC |
| | AGCTCACTCAAAGGCGGTAATACGGTTATCCACAGAATCAGGGGATAACGCAGGAAAGAAC |
| | ATGTGAGCAAAAGGCCAGCAAAAGGCCAGGAACCGTAAAAAGGCCGCGTTGCTGGCGTTTTT |
| | CCATAGGCTCCGCCCCCCTGACGAGCATCACAAAAATCGACGCTCAAGTCAGAGGTGGCGAA |
| | ACCCGACAGGACTATAAAGATACCAGGCGTTTCCCCCTGGAAGCTCCCTCGTGCGCTCTCCTG |
| | TTCCGACCCTGCCGCTTACCGGATACCTGTCCGCCTTTCTCCCTTCGGGAAGCGTGGCGCTTTC |
| | TCATAGCTCACGCTGTAGGTATCTCAGTTCGGTGTAGGTCGTTCGCTCCAAGCTGGGCTGTGT |
| | GCACGAACCCCCCGTTCAGCCCGACCGCTGCGCCTTATCCGGTAACTATCGTCTTGAGTCCAA |
| | CCCGGTAAGACACGACTTATCGCCACTGGCAGCAGCCACTGGTAACAGGATTAGCAGAGCGA |
| | GGTATGTAGGCGGTGCTACAGAGTTCTTGAAGTGGTGGCCTAACTACGGCTACACTAGAAGA |
| | ACAGTATTTGGTATCTGCGCTCTGCTGAAGCCAGTTACCTTCGGAAAAAGAGTTGGTAGCTCT |
| | TGATCCGGCAAACAAACCACCGCTGGTAGCGGTGGTTTTTTTGTTTGCAAGCAGCAGATTACG |
| | CGCAGAAAAAAAGGATCTCAAGAAGATCCTTTGATCTTTTCTACGGGGTCTGACGCTCAGTG |
| | GAACGAAAACTCACGTTAAGGGATTTTGGTCATGAGATTATCAAAAAGGATCTTCACCTAGA |
| | TCCTTTTAAATTAAAAATGAAGTTTTAAATCAATCTAAAGTATATATGAGTAAACTTGGTCTG |
| | ACAGTTACCAATGCTTAATCAGTGAGGCACCTATCTCAGCGATCTGTCTATTTCGTTCATCCAT |
| | AGTTGCCTGACTCCCCGTCGTGTAGATAACTACGATACGGGAGGGCTTACCATCTGGCCCCAG |
| | TGCTGCAATGATACCGCGAGACCCACGCTCACCGGCTCCAGATTTATCAGCAATAAACCAGC |
| | CAGCCGGAAGGGCCGAGCGCAGAAGTGGTCCTGCAACTTTATCCGCCTCCATCCAGTCTATTA |
| | ATTGTTGCCGGGAAGCTAGAGTAAGTAGTTCGCCAGTTAATAGTTTGCGCAACGTTGTTGCCA |
| | TTGCTACAGGCATCGTGGTGTCACGCTCGTCGTTTGGTATGGCTTCATTCAGCTCCGGTTCCCA |
| | ACGATCAAGGCGAGTTACATGATCCCCCATGTTGTGCAAAAAAGCGGTTAGCTCCTTCGGTCC |
| | TCCGATCGTTGTCAGAAGTAAGTTGGCCGCAGTGTTATCACTCATGGTTATGGCAGCACTGCA |
| | TAATTCTCTTACTGTCATGCCATCCGTAAGATGCTTTTCTGTGACTGGTGAGTACTCAACCAAG |
| | TCATTCTGAGAATAGTGTATGCGGCGACCGAGTTGCTCTTGCCCGGCGTCAATACGGGATAAT |
| | ACCGCGCCACATAGCAGAACTTTAAAAGTGCTCATCATTGGAAAACGTTCTTCGGGGCGAAA |
| | ACTCTCAAGGATCTTACCGCTGTTGAGATCCAGTTCGATGTAACCCACTCGTGCACCCAACTG |
| | ATCTTCAGCATCTTTTACTTTCACCAGCGTTTCTGGGTGAGCAAAAACAGGAAGGCAAAATGC |
| | CGCAAAAAAGGGAATAAGGGCGACACGGAAATGTTGAATACTCATACTCTTCCTTTTTCAAT |
| | ATTATTGAAGCATTTATCAGGGTTATTGTCTCATGAGCGGATACATATTTGAATGTATTTAGA |
| | AAAATAAACAAATAGGGGTTCCGCGCACATTTCCCCGAAAAGTGCCACCTGGGTCGACATTG |
| | ATTATTGACTAGTAATAGTAATCAATTACGGGGTCATTAGTTCATAGCCCATATATGGAGTTC |
| | CG (SEQ ID NO: 366) |
| IB20_pCM | CGTTACATAACTTACGGTAAATGGCCCGCCTGGCTGACCGCCCAACGACCCCCGCCCATTGAC |
| V-HA- | GTCAATAATGACGTATGTTCCCATAGTAACGCCAATAGGGACTTTCCATTGACGTCAATGGGT |
| NLS- | GGAGTATTTACGGTAAACTGCCCACTTGGCAGTACATCAAGTGTATCATATGCCAAGTACGCC |
| TnsD1 | CCCTATTGACGTCAATGACGGTAAATGGCCCGCCTGGCATTATGCCCAGTACATGACCTTATG |
| | GGACTTTCCTACTTGGCAGTACATCTACGTATTAGTCATCGCTATTACCATGGTGATGCGGTTT |
| | TGGCAGTACATCAATGGGCGTGGATAGCGGTTTGACTCACGGGGATTTCCAAGTCTCCACCCC |
| | ATTGACGTCAATGGGAGTTTGTTTTGGCACCAAAATCAACGGGACTTTCCAAAATGTCGTAAC |
| | AACTCCGCCCCATTGACGCAAATGGGCGGTAGGCGTGTACGGTGGGAGGTCTATATAAGCAG |
| | AGCTGGTTTAGTGAACCGTCAGATCCGCTAGCGCTACCGGACTCAGATCGCCACCATGTACCC |
| | CTACGACGTGCCAGACTACGCCCCTAAGAAGAAGAGAAAAGTCGGCGGCTCTGGCGGCGGA |
| | GGATCTGGCGGAGGTGGAAGCGGAGGAACCATCTACAGCGAGCACTGGTCCCTGAATCCTCT |
| | GGAAATCCCTCAGCGGAGCCGGCTGTTTAGCCTGGAACCTGTGGCTGTGGGCACACCTTATGC |
| | CGAGAGCCTGAGCAGCTACCTGCACAGACTGGCCCAGGCTCACTGTCTGACAAGCGAGAAGC |
| | TGGTCATGGGCGAGATCGCCCCTCTGATCCTGAAGGACGAGGACAAGAGCGAGCTGCTGAGC |
| | AAGAACCTGAGCCATCTGCTGGGCAACAGCGACGCCAAGCCTGCCATCAATGGCATGAGAGA |
| | GATGACCGAGAAGCTCGTGACCGTGCTGGAAGAACTGACCATGCGGCAGGACCTGCGGTTTC |
| | TGACACTGCTGTCTTGGAAGGGCATGATCTACGACAAGGGCCTGTTCCGCAACTACAGAGCC |
| | TGGTGTCCTTGCTGCTGCGAGGAATGGATGCAGAAGAACAAGACAATCTACGAGCCCCTGAG |
| | CTGGTCCTTCAAGGACGTGGAATTCTGCCTGATCCACAAGCAGCGGCTGATCGAGGAATGCA |
| | GCCATTGTGGCGCTAGACTGCCCGTGATGGCCAGACTTTCTCCTGCCGGCTTCTGCAGCAGAT |
| | GCTATGGCTGGCTGGGCCAAGAGATCAAGGGCGAAGAGGAAATCGAGAAGTACCGCGTGAA |
| | CATCCAGGGCATCTCCGAGCTGATTGCCCTGACACCTCAGCTGGGCTACAAGCCCATTCCTAT |
| | CGAGCTGACCCGGAAACTGCAGCTGATCCTGCTGGTGTTCGAGCAGGCCATCGGCAAGGATG |
| | TGAAGCTGCTGGGAGATCTCGGCGGCATCATGGAAAGCCTGAGAATCGCCAGCACCACCAAC |
| | CAGAGCCAGCCTTACCACCTGGTCAAGCTGATCATCCCCGTGTGCGAGAAGGCCAAGATCAG |
| | CGTGTTCCAGCTGTTCGGCAGCGACTTCAAAGAGCTGGGCAAGATCCTGTTTGGCAACTTCTC |
| | CCTGGAACTGAAACTGTGACTAGCATAACCCCTTGGGGCGCACTCCTCAGGTGCAGGCTGCCT |
| | ATCAGAAGGTGGTGGCTGGTGTGGCCAATGCCCTGGCTCACAAATACCACTGAGATCTTTTTC |
| | CCTCTGCCAAAAATTATGGGGACATCATGAAGCCCCTTGAGCATCTGACTTCTGGCTAATAAA |
| | GGAAATTTATTTTCATTGCAATAGTGTGTTGGAATTTTTTGTGTCTCTCACTCGGAAGGACATA |
| | TGGGAGGGCAAATCATTTAAAACATCAGAATGAGTATTTGGTTTAGAGTTTGGCAACATATG |
| | CCCATATGCTGGCTGCCATGAACAAAGGTTGGCTATAAAGAGGTCATCAGTATATGAAACAG |
| | CCCCCTGCTGTCCATTCCTTATTCCATAGAAAAGCCTTGACTTGAGGTTAGATTTTTTTTATAT |
| | TTTGTTTTGTGTTATTTTTTTCTTTAACATCCCTAAAATTTTCCTTACATGTTTTACTAGCCAGA |
| | TTTTTCCTCCTCTCCTGACTACTCCCAGTCATAGCTGTCCCTCTTCTCTTATGGAGATCCCTCGA |
| | CCTGCAGCCCAAGCTTGGCGTAATCATGGTCATAGCTGTTTCCTGTGTGAAATTGTTATCCGC |
| | TCACAATTCCACACAACATACGAGCCGGAAGCATAAAGTGTAAAGCCTGGGGTGCCTAATGA |
| | GTGAGCTAACTCACATTAATTGCGTTGCGCTCACTGCCCGCTTTCCAGTCGGGAAACCTGTCG |
| | TGCCAGCGGATCCGCATCTCAATTAGTCAGCAACCATAGTCCCGCCCCTAACTCCGCCCATCC |
| | CGCCCCTAACTCCGCCCAGTTCCGCCCATTCTCCGCCCCATGGCTGACTAATTTTTTTTATTTA |
| | TGCAGAGGCCGAGGCCGCCTCGGCCTCTGAGCTATTCCAGAAGTAGTGAGGAGGCTTTTTTG |
| | GAGGCCTAGGCTTTTGCAAAAAGCTAACTTGTTTATTGCAGCTTATAATGGTTACAAATAAAG |
| | CAATAGCATCACAAATTTCACAAATAAAGCATTTTTTTCACTGCATTCTAGTTGTGGTTTGTCC |
| | AAACTCATCAATGTATCTTATCATGTCTGGATCCGCTGCATTAATGAATCGGCCAACGCGCGG |
| | GGAGAGGCGGTTTGCGTATTGGGCGCTCTTCCGCTTCCTCGCTCACTGACTCGCTGCGCTCGG |
| | TCGTTCGGCTGCGGCGAGCGGTATCAGCTCACTCAAAGGCGGTAATACGGTTATCCACAGAA |
| | TCAGGGGATAACGCAGGAAAGAACATGTGAGCAAAAGGCCAGCAAAAGGCCAGGAACCGTA |
| | AAAAGGCCGCGTTGCTGGCGTTTTTCCATAGGCTCCGCCCCCCTGACGAGCATCACAAAAATC |
| | GACGCTCAAGTCAGAGGTGGCGAAACCCGACAGGACTATAAAGATACCAGGCGTTTCCCCCT |
| | GGAAGCTCCCTCGTGCGCTCTCCTGTTCCGACCCTGCCGCTTACCGGATACCTGTCCGCCTTTC |
| | TCCCTTCGGGAAGCGTGGCGCTTTCTCATAGCTCACGCTGTAGGTATCTCAGTTCGGTGTAGG |
| | TCGTTCGCTCCAAGCTGGGCTGTGTGCACGAACCCCCCGTTCAGCCCGACCGCTGCGCCTTAT |
| | CCGGTAACTATCGTCTTGAGTCCAACCCGGTAAGACACGACTTATCGCCACTGGCAGCAGCC |
| | ACTGGTAACAGGATTAGCAGAGCGAGGTATGTAGGCGGTGCTACAGAGTTCTTGAAGTGGTG |
| | GCCTAACTACGGCTACACTAGAAGAACAGTATTTGGTATCTGCGCTCTGCTGAAGCCAGTTAC |
| | CTTCGGAAAAAGAGTTGGTAGCTCTTGATCCGGCAAACAAACCACCGCTGGTAGCGGTGGTT |
| | TTTTTGTTTGCAAGCAGCAGATTACGCGCAGAAAAAAAGGATCTCAAGAAGATCCTTTGATCT |
| | TTTCTACGGGGTCTGACGCTCAGTGGAACGAAAACTCACGTTAAGGGATTTTGGTCATGAGAT |
| | TATCAAAAAGGATCTTCACCTAGATCCTTTTAAATTAAAAATGAAGTTTTAAATCAATCTAAA |
| | GTATATATGAGTAAACTTGGTCTGACAGTTACCAATGCTTAATCAGTGAGGCACCTATCTCAG |
| | CGATCTGTCTATTTCGTTCATCCATAGTTGCCTGACTCCCCGTCGTGTAGATAACTACGATACG |
| | GGAGGGCTTACCATCTGGCCCCAGTGCTGCAATGATACCGCGAGACCCACGCTCACCGGCTC |
| | CAGATTTATCAGCAATAAACCAGCCAGCCGGAAGGGCCGAGCGCAGAAGTGGTCCTGCAACT |
| | TTATCCGCCTCCATCCAGTCTATTAATTGTTGCCGGGAAGCTAGAGTAAGTAGTTCGCCAGTT |
| | AATAGTTTGCGCAACGTTGTTGCCATTGCTACAGGCATCGTGGTGTCACGCTCGTCGTTTGGT |
| | ATGGCTTCATTCAGCTCCGGTTCCCAACGATCAAGGCGAGTTACATGATCCCCCATGTTGTGC |
| | AAAAAAGCGGTTAGCTCCTTCGGTCCTCCGATCGTTGTCAGAAGTAAGTTGGCCGCAGTGTTA |
| | TCACTCATGGTTATGGCAGCACTGCATAATTCTCTTACTGTCATGCCATCCGTAAGATGCTTTT |
| | CTGTGACTGGTGAGTACTCAACCAAGTCATTCTGAGAATAGTGTATGCGGCGACCGAGTTGCT |
| | CTTGCCCGGCGTCAATACGGGATAATACCGCGCCACATAGCAGAACTTTAAAAGTGCTCATC |
| | ATTGGAAAACGTTCTTCGGGGCGAAAACTCTCAAGGATCTTACCGCTGTTGAGATCCAGTTCG |
| | ATGTAACCCACTCGTGCACCCAACTGATCTTCAGCATCTTTTACTTTCACCAGCGTTTCTGGGT |
| | GAGCAAAAACAGGAAGGCAAAATGCCGCAAAAAAGGGAATAAGGGCGACACGGAAATGTT |
| | GAATACTCATACTCTTCCTTTTTCAATATTATTGAAGCATTTATCAGGGTTATTGTCTCATGAG |
| | CGGATACATATTTGAATGTATTTAGAAAAATAAACAAATAGGGGTTCCGCGCACATTTCCCCG |
| | AAAAGTGCCACCTGGGTCGACATTGATTATTGACTAGTAATAGTAATCAATTACGGGGTCATT |
| | AGTTCATAGCCCATATATGGAGTTCCG (SEQ ID NO: 367) |
| IB20_pCM | CGTTACATAACTTACGGTAAATGGCCCGCCTGGCTGACCGCCCAACGACCCCCGCCCATTGAC |
| V-HA- | GTCAATAATGACGTATGTTCCCATAGTAACGCCAATAGGGACTTTCCATTGACGTCAATGGGT |
| NLS- | GGAGTATTTACGGTAAACTGCCCACTTGGCAGTACATCAAGTGTATCATATGCCAAGTACGCC |
| TnsAB | CCCTATTGACGTCAATGACGGTAAATGGCCCGCCTGGCATTATGCCCAGTACATGACCTTATG |
| | GGACTTTCCTACTTGGCAGTACATCTACGTATTAGTCATCGCTATTACCATGGTGATGCGGTTT |
| | TGGCAGTACATCAATGGGCGTGGATAGCGGTTTGACTCACGGGGATTTCCAAGTCTCCACCCC |
| | ATTGACGTCAATGGGAGTTTGTTTTGGCACCAAAATCAACGGGACTTTCCAAAATGTCGTAAC |
| | AACTCCGCCCCATTGACGCAAATGGGCGGTAGGCGTGTACGGTGGGAGGTCTATATAAGCAG |
| | AGCTGGTTTAGTGAACCGTCAGATCCGCTAGCGCTACCGGACTCAGATCGCCACCATGTACCC |
| | CTACGACGTGCCAGACTACGCCCCTAAGAAGAAGAGAAAAGTCGGCGGCTCTGGCGGCGGA |
| | GGATCTGGCGGAGGTGGAAGCGGAGGAAAGGAACAGTTCGAGCAGTGGGTCGCCCGGCTGC |
| | AGATTTCTGAAGCCGGCCAGAAAATCATCGAGAAAGTGCGGAGCAGCGAGCCCAGCAGAAG |
| | AGTTGGCGGAGGCAGCAAGAATGTGTCCGGCAGATACCCCTCCAGAAAGATGGGCGTGACCA |
| | TCCAGTTCGAGAGCCACAGAGTGGAACTGCCCATCATCTACCAGCTGGAACACGACAAGGAC |
| | GTGCTGGAATTCTACGACCAGCCTCCTCAGATCAAGCTGGACTACCAGGCCAGCAATGGCAG |
| | ACGACTGGGAGTGCTGCACACCCCTGATCTGTTCGTGATCAGGACCAATAGCGCCGGCTGGG |
| | AAGAGTGCAAGACCGAGCAGGATCTGAAGAAGCTGGCCGAGAAGAACCCCAACCGGTACTT |
| | CTACAGCGAAGAGAACAACCAGTGGCACAGCCTGCCTGGCGAGGTGTACGCCAATCAGTTTG |
| | GCCTGTACCACCGGATCCACAGCGACCGCGAAATCAACTGGGTGCTGCAGCGGAACCTGCAG |
| | TTCCTGGAAGATTACTACCGCAGCGAGAGCCTGGTGGTGGAAGAGGCCATTGCTCAGTCTCT |
| | GCTGGCCATCGTGTCTAGCCAGCCTGGAATTACACTGGCCGAGCTGCTGAACAGAAGCACCG |
| | GCGCCAAGAGCGACGACATCTACACCCTGATCATCCAAGAGCAGATCTACATCGACCTGAAC |
| | GCCACACCTCTGGCTGAGCCTGAGAGATGCCTGATCTTCAGGGATGAGCAGACCGCCAGCGC |
| | CTACAGACTGATGGTTGAGCAGCCTAGCGTGTCCCTGCCTGCCATCTCTCCCGTGGTCAATAT |
| | TGTGACAGGCGCCACCGTGTCCTGGGATGGCAAGGGCCTGAATATCATCCACGTGGGCGAGA |
| | CAGAAGTGATCCTGGGCGCCGAGAACAATCAGCTCATCGAACTGAAGAAGGCCATCTTCGAG |
| | AACCTCGTGCGGCAGGGCAAGATCACCTCTCTGCAGACCCCAGAGAAAACCGCCATCAGCAC |
| | AGAGAGCTGGCAGCGGTTTCATCAGGCCTCTCCAGAGGATCAGGCCGAGGCTCTGGAACGGT |
| | ACAAGACCATCGAGCCCTACCTGAACGGACACCCTCCTGAGAACGAGACAATCCCCGCCAGA |
| | ACCATCAGACACTGGAAGGCCAAGTACCTGATCGCCATCCAGAAGTACGGCTGCGGCTATAT |
| | CGGCCTGCTGTCCCACAGAAGCGTGAAGGGCAACAGACAGAGAAAGCTGCCCGAGGACACC |
| | CTGGCCATCATGGAAAAGTTCATTCTCGAGGACTACGAGACACTGAAGCAGAAACGGATGTG |
| | GGAAGTGCACGCCGCTCTCGTGCGAGCTTGTGAAGAAGCAGGCGTTATCGCCCCTAGCTACA |
| | AGGCCTTCACCAAAGAGGTGCAGCGGAGAACCGGCTACGAGCAGACCAAGAAGAGACAAGG |
| | CAGAAGGGCCGCCTACCAGCACGAGTCCTTTTACTGGGAACTCGCCATCACCACACCTCGGC |
| | ACGGCGATAGACCTTTCGAGATCGGCCACATCGACCACACCGAGCTGGATGTGGAACTCGTG |
| | TGTAGCGACACCGGCAGAAACCTGGGTAGACCTTGGGCCACCTTTCTGGTGGACGCCTACTCT |
| | AGAAGGCTGCTGGCCGTGTACCTGACCTTCGACAGCCCAAGCTACCGGTCCTGTCTCATGGTG |
| | CTGCGGATCTGCGTGAAGAGGCATGGCAGACTGCCTCAGATCGTGGTGGTCGATAATGGCGC |
| | CGAGTTTCACAGCGTGTACTTCGAAACCCTGCTGGCTACCTTCGAGTGCACCAAGAAGCAGC |
| | GGCCTCCAGCCAAGGCCAGATTTGGCAGCGTGTGCGAGAGACTGTTCGGCACCAGCAACACC |
| | CAGTTCGTGCACAACCTGCTGGGCAATACCCAGATCACCCGGAACGTGCGGCAAGTGACCAA |
| | GAGCGTGAACCCCAAGAACCTGGCTGTGTGGACACTGGGACTGCTGTACGAGTACCTGTGTG |
| | CCTGGGCCTACGAAGTGTACGATACCGACGAACACCCCGCTCTGTTTCAGAGCCCTAGGGAT |
| | GCCTTTGCCGCCGGAATGGCTATCGGCGGATCTCGGGTGCACAGAATGATCCCTTACGACGA |
| | GAACTTCCAGATCCTGACACTGCCCACCACCTCCGAGGGCAAAGCCAAGGTGCAAGTCGGCA |
| | GAGGCATCAAGATCAACTACATCTACTACTGGTCCAACAGCTTCAGGGACCCACAGATCGAG |
| | AACACCAGCGTGCAGATCAGATACGACCCCTTCAACATCGGAATCGCCTACGCCTTCGTCAG |
| | AGGCCAGTGGGTGCAGTGCATCAGCCAGTACTACGCCGAACTCCAGGGCAGAAGCGAGAAA |
| | GAGCTGAAACTGGCCAGCATCGAGCTGCGGAAGCACTACAGCAATCACACCCAGCAGAGCA |
| | AGGTGTCCGCCAAAAACCTGGCCGAGTTCCTGGCAAGCGTGGAAGCTCAAGAAGCCCTGCTG |
| | GAACAGAGAAGCTACGACGCCGAAGTGAAAGAGGTGTTCCGGGTCATCGAAGGCGGCAAGG |
| | CCACAACCAGCAGAAATGAGGAACCCAAGCTGATCCAAGTGACCTTCGCCAACACCGACTTC |
| | CAGGCCGATGAGGACGAAGCCATCGTGCCTGAAACACTGGTGGTGTACGAGGAATTCTGACT |
| | AGCATAACCCCTTGGGGCGCACTCCTCAGGTGCAGGCTGCCTATCAGAAGGTGGTGGCTGGT |
| | GTGGCCAATGCCCTGGCTCACAAATACCACTGAGATCTTTTTCCCTCTGCCAAAAATTATGGG |
| | GACATCATGAAGCCCCTTGAGCATCTGACTTCTGGCTAATAAAGGAAATTTATTTTCATTGCA |
| | ATAGTGTGTTGGAATTTTTTGTGTCTCTCACTCGGAAGGACATATGGGAGGGCAAATCATTTA |
| | AAACATCAGAATGAGTATTTGGTTTAGAGTTTGGCAACATATGCCCATATGCTGGCTGCCATG |
| | AACAAAGGTTGGCTATAAAGAGGTCATCAGTATATGAAACAGCCCCCTGCTGTCCATTCCTTA |
| | TTCCATAGAAAAGCCTTGACTTGAGGTTAGATTTTTTTTATATTTTGTTTTGTGTTATTTTTTTC |
| | TTTAACATCCCTAAAATTTTCCTTACATGTTTTACTAGCCAGATTTTTCCTCCTCTCCTGACTAC |
| | TCCCAGTCATAGCTGTCCCTCTTCTCTTATGGAGATCCCTCGACCTGCAGCCCAAGCTTGGCGT |
| | AATCATGGTCATAGCTGTTTCCTGTGTGAAATTGTTATCCGCTCACAATTCCACACAACATAC |
| | GAGCCGGAAGCATAAAGTGTAAAGCCTGGGGTGCCTAATGAGTGAGCTAACTCACATTAATT |
| | GCGTTGCGCTCACTGCCCGCTTTCCAGTCGGGAAACCTGTCGTGCCAGCGGATCCGCATCTCA |
| | ATTAGTCAGCAACCATAGTCCCGCCCCTAACTCCGCCCATCCCGCCCCTAACTCCGCCCAGTT |
| | CCGCCCATTCTCCGCCCCATGGCTGACTAATTTTTTTTATTTATGCAGAGGCCGAGGCCGCCTC |
| | GGCCTCTGAGCTATTCCAGAAGTAGTGAGGAGGCTTTTTTGGAGGCCTAGGCTTTTGCAAAAA |
| | GCTAACTTGTTTATTGCAGCTTATAATGGTTACAAATAAAGCAATAGCATCACAAATTTCACA |
| | AATAAAGCATTTTTTTCACTGCATTCTAGTTGTGGTTTGTCCAAACTCATCAATGTATCTTATC |
| | ATGTCTGGATCCGCTGCATTAATGAATCGGCCAACGCGCGGGGAGAGGCGGTTTGCGTATTG |
| | GGCGCTCTTCCGCTTCCTCGCTCACTGACTCGCTGCGCTCGGTCGTTCGGCTGCGGCGAGCGG |
| | TATCAGCTCACTCAAAGGCGGTAATACGGTTATCCACAGAATCAGGGGATAACGCAGGAAAG |
| | AACATGTGAGCAAAAGGCCAGCAAAAGGCCAGGAACCGTAAAAAGGCCGCGTTGCTGGCGT |
| | TTTTCCATAGGCTCCGCCCCCCTGACGAGCATCACAAAAATCGACGCTCAAGTCAGAGGTGG |
| | CGAAACCCGACAGGACTATAAAGATACCAGGCGTTTCCCCCTGGAAGCTCCCTCGTGCGCTCT |
| | CCTGTTCCGACCCTGCCGCTTACCGGATACCTGTCCGCCTTTCTCCCTTCGGGAAGCGTGGCG |
| | CTTTCTCATAGCTCACGCTGTAGGTATCTCAGTTCGGTGTAGGTCGTTCGCTCCAAGCTGGGCT |
| | GTGTGCACGAACCCCCCGTTCAGCCCGACCGCTGCGCCTTATCCGGTAACTATCGTCTTGAGT |
| | CCAACCCGGTAAGACACGACTTATCGCCACTGGCAGCAGCCACTGGTAACAGGATTAGCAGA |
| | GCGAGGTATGTAGGCGGTGCTACAGAGTTCTTGAAGTGGTGGCCTAACTACGGCTACACTAG |
| | AAGAACAGTATTTGGTATCTGCGCTCTGCTGAAGCCAGTTACCTTCGGAAAAAGAGTTGGTA |
| | GCTCTTGATCCGGCAAACAAACCACCGCTGGTAGCGGTGGTTTTTTTGTTTGCAAGCAGCAGA |
| | TTACGCGCAGAAAAAAAGGATCTCAAGAAGATCCTTTGATCTTTTCTACGGGGTCTGACGCTC |
| | AGTGGAACGAAAACTCACGTTAAGGGATTTTGGTCATGAGATTATCAAAAAGGATCTTCACC |
| | TAGATCCTTTTAAATTAAAAATGAAGTTTTAAATCAATCTAAAGTATATATGAGTAAACTTGG |
| | TCTGACAGTTACCAATGCTTAATCAGTGAGGCACCTATCTCAGCGATCTGTCTATTTCGTTCAT |
| | CCATAGTTGCCTGACTCCCCGTCGTGTAGATAACTACGATACGGGAGGGCTTACCATCTGGCC |
| | CCAGTGCTGCAATGATACCGCGAGACCCACGCTCACCGGCTCCAGATTTATCAGCAATAAAC |
| | CAGCCAGCCGGAAGGGCCGAGCGCAGAAGTGGTCCTGCAACTTTATCCGCCTCCATCCAGTC |
| | TATTAATTGTTGCCGGGAAGCTAGAGTAAGTAGTTCGCCAGTTAATAGTTTGCGCAACGTTGT |
| | TGCCATTGCTACAGGCATCGTGGTGTCACGCTCGTCGTTTGGTATGGCTTCATTCAGCTCCGGT |
| | TCCCAACGATCAAGGCGAGTTACATGATCCCCCATGTTGTGCAAAAAAGCGGTTAGCTCCTTC |
| | GGTCCTCCGATCGTTGTCAGAAGTAAGTTGGCCGCAGTGTTATCACTCATGGTTATGGCAGCA |
| | CTGCATAATTCTCTTACTGTCATGCCATCCGTAAGATGCTTTTCTGTGACTGGTGAGTACTCAA |
| | CCAAGTCATTCTGAGAATAGTGTATGCGGCGACCGAGTTGCTCTTGCCCGGCGTCAATACGGG |
| | ATAATACCGCGCCACATAGCAGAACTTTAAAAGTGCTCATCATTGGAAAACGTTCTTCGGGG |
| | CGAAAACTCTCAAGGATCTTACCGCTGTTGAGATCCAGTTCGATGTAACCCACTCGTGCACCC |
| | AACTGATCTTCAGCATCTTTTACTTTCACCAGCGTTTCTGGGTGAGCAAAAACAGGAAGGCAA |
| | AATGCCGCAAAAAAGGGAATAAGGGCGACACGGAAATGTTGAATACTCATACTCTTCCTTTT |
| | TCAATATTATTGAAGCATTTATCAGGGTTATTGTCTCATGAGCGGATACATATTTGAATGTATT |
| | TAGAAAAATAAACAAATAGGGGTTCCGCGCACATTTCCCCGAAAAGTGCCACCTGGGTCGAC |
| | ATTGATTATTGACTAGTAATAGTAATCAATTACGGGGTCATTAGTTCATAGCCCATATATGGA |
| | GTTCCG (SEQ ID NO: 368) |
| IB20_pCM | CGTTACATAACTTACGGTAAATGGCCCGCCTGGCTGACCGCCCAACGACCCCCGCCCATTGAC |
| V-HA- | GTCAATAATGACGTATGTTCCCATAGTAACGCCAATAGGGACTTTCCATTGACGTCAATGGGT |
| NLS-TnsC | GGAGTATTTACGGTAAACTGCCCACTTGGCAGTACATCAAGTGTATCATATGCCAAGTACGCC |
| | CCCTATTGACGTCAATGACGGTAAATGGCCCGCCTGGCATTATGCCCAGTACATGACCTTATG |
| | GGACTTTCCTACTTGGCAGTACATCTACGTATTAGTCATCGCTATTACCATGGTGATGCGGTTT |
| | TGGCAGTACATCAATGGGCGTGGATAGCGGTTTGACTCACGGGGATTTCCAAGTCTCCACCCC |
| | ATTGACGTCAATGGGAGTTTGTTTTGGCACCAAAATCAACGGGACTTTCCAAAATGTCGTAAC |
| | AACTCCGCCCCATTGACGCAAATGGGCGGTAGGCGTGTACGGTGGGAGGTCTATATAAGCAG |
| | AGCTGGTTTAGTGAACCGTCAGATCCGCTAGCGCTACCGGACTCAGATCGCCACCATGTACCC |
| | CTACGACGTGCCAGACTACGCCCCTAAGAAGAAGAGAAAAGTCGGCGGCTCTGGCGGCGGA |
| | GGATCTGGCGGAGGTGGAAGCGGAGGAACCAAGAGCACCGGCTTTCCACTGGAACTGCTGAC |
| | CAGACCTGCCACCGAGAGACTGGCCTACTTCGAGAACTACACCGTGGCTCACCCCAGACTGA |
| | AAGAGGTGTACGAGATCCTGATGCGGACAATCGCCGAACCTGCCGGCGCTAGCTTCATCTTT |
| | GTGTATGGCGCTAGCGGCGTGGGCAAGACCACACTGAGACTGAGAGTGGAACAGAAGCTGA |
| | CCGAGCTGGCCCTGCCTAAGCTGGAAAGCGATAGAGCCAGAGTGCCCGTCGTGGGCATTGAG |
| | GCTATTGCCCCTGAGAGCCGGTACTTCAACTGGAAAGAGTACTACACACGGGCCCTGATCAC |
| | CCTGGAAGAACCCCTGATCGACCACAAGTTCGACTATGGCGTGCGGGGCATCAGCAGAGACA |
| | ACTTCGGCAAGATCAACGTGGAAAGCAAGGTGGTGGCCCCTGCTCTGAGAAGGGCCCTCGAA |
| | AATGCCCTGATCCACAGACACCCCGACGTGTTCTTTGTGGACGAGGCCCAGCACTTTGGCAAG |
| | GTGGCCTCTGGCTACAAGCTGCAGGATCAGCTGGACTGCCTGAAGTCCCTGGCCAACATGAC |
| | AGGCATCCTGCACTGTCTGCTGGGCACCTACGAGCTGCTGACCTTCAGAAATCTGAGCGGCCA |
| | GCTGTCTCGGCGGAGCGTGGACATCCACTTCAGAAGATACTGCGCCGACTCTCCCGAGGACG |
| | TGCAGGCCTTTAAAAGCGTGCTGCTGACATTCCAGCAGCATCTGCCTCTGGCCGAGACACCCA |
| | ATCTGGTGGATCACTGGGAGTACTTCTACGAGAGAACCCTGGGCTGCATCGGCACCCTGAAG |
| | GACTGGCTGAAGAGAGTGCTGAGCGACGCCCTGGATAGAGAGGCCACAACCATCACACTGA |
| | AGGACCTGCAGAAAAGGGCCCTGAGCGTGGCCCAGTGCCAGAAGATGTTCAAAGAGATCCA |
| | AGAGGGCGAACGCCAGCTGAGCGAAACAGAGGCCGATGTGCAGAACCTGAGATCTGCCCTT |
| | GGCCTGGGAGCCAAGCCTATCGTTCTGCCTGAGGAAACCCCTAAGACCACCAGACCTCCAGG |
| | CAAAGTGGGCAAAAGAAAGCCCAAGAGGGACCCCATCGGAGTGCAGCAGGATGTGTCTTGA |
| | CTAGCATAACCCCTTGGGGCGCACTCCTCAGGTGCAGGCTGCCTATCAGAAGGTGGTGGCTG |
| | GTGTGGCCAATGCCCTGGCTCACAAATACCACTGAGATCTTTTTCCCTCTGCCAAAAATTATG |
| | GGGACATCATGAAGCCCCTTGAGCATCTGACTTCTGGCTAATAAAGGAAATTTATTTTCATTG |
| | CAATAGTGTGTTGGAATTTTTTGTGTCTCTCACTCGGAAGGACATATGGGAGGGCAAATCATT |
| | TAAAACATCAGAATGAGTATTTGGTTTAGAGTTTGGCAACATATGCCCATATGCTGGCTGCCA |
| | TGAACAAAGGTTGGCTATAAAGAGGTCATCAGTATATGAAACAGCCCCCTGCTGTCCATTCCT |
| | TATTCCATAGAAAAGCCTTGACTTGAGGTTAGATTTTTTTTATATTTTGTTTTGTGTTATTTTTT |
| | TCTTTAACATCCCTAAAATTTTCCTTACATGTTTTACTAGCCAGATTTTTCCTCCTCTCCTGACT |
| | ACTCCCAGTCATAGCTGTCCCTCTTCTCTTATGGAGATCCCTCGACCTGCAGCCCAAGCTTGG |
| | CGTAATCATGGTCATAGCTGTTTCCTGTGTGAAATTGTTATCCGCTCACAATTCCACACAACA |
| | TACGAGCCGGAAGCATAAAGTGTAAAGCCTGGGGTGCCTAATGAGTGAGCTAACTCACATTA |
| | ATTGCGTTGCGCTCACTGCCCGCTTTCCAGTCGGGAAACCTGTCGTGCCAGCGGATCCGCATC |
| | TCAATTAGTCAGCAACCATAGTCCCGCCCCTAACTCCGCCCATCCCGCCCCTAACTCCGCCCA |
| | GTTCCGCCCATTCTCCGCCCCATGGCTGACTAATTTTTTTTATTTATGCAGAGGCCGAGGCCGC |
| | CTCGGCCTCTGAGCTATTCCAGAAGTAGTGAGGAGGCTTTTTTGGAGGCCTAGGCTTTTGCAA |
| | AAAGCTAACTTGTTTATTGCAGCTTATAATGGTTACAAATAAAGCAATAGCATCACAAATTTC |
| | ACAAATAAAGCATTTTTTTCACTGCATTCTAGTTGTGGTTTGTCCAAACTCATCAATGTATCTT |
| | ATCATGTCTGGATCCGCTGCATTAATGAATCGGCCAACGCGCGGGGAGAGGCGGTTTGCGTA |
| | TTGGGCGCTCTTCCGCTTCCTCGCTCACTGACTCGCTGCGCTCGGTCGTTCGGCTGCGGCGAG |
| | CGGTATCAGCTCACTCAAAGGCGGTAATACGGTTATCCACAGAATCAGGGGATAACGCAGGA |
| | AAGAACATGTGAGCAAAAGGCCAGCAAAAGGCCAGGAACCGTAAAAAGGCCGCGTTGCTGG |
| | CGTTTTTCCATAGGCTCCGCCCCCCTGACGAGCATCACAAAAATCGACGCTCAAGTCAGAGGT |
| | GGCGAAACCCGACAGGACTATAAAGATACCAGGCGTTTCCCCCTGGAAGCTCCCTCGTGCGC |
| | TCTCCTGTTCCGACCCTGCCGCTTACCGGATACCTGTCCGCCTTTCTCCCTTCGGGAAGCGTGG |
| | CGCTTTCTCATAGCTCACGCTGTAGGTATCTCAGTTCGGTGTAGGTCGTTCGCTCCAAGCTGG |
| | GCTGTGTGCACGAACCCCCCGTTCAGCCCGACCGCTGCGCCTTATCCGGTAACTATCGTCTTG |
| | AGTCCAACCCGGTAAGACACGACTTATCGCCACTGGCAGCAGCCACTGGTAACAGGATTAGC |
| | AGAGCGAGGTATGTAGGCGGTGCTACAGAGTTCTTGAAGTGGTGGCCTAACTACGGCTACAC |
| | TAGAAGAACAGTATTTGGTATCTGCGCTCTGCTGAAGCCAGTTACCTTCGGAAAAAGAGTTG |
| | GTAGCTCTTGATCCGGCAAACAAACCACCGCTGGTAGCGGTGGTTTTTTTGTTTGCAAGCAGC |
| | AGATTACGCGCAGAAAAAAAGGATCTCAAGAAGATCCTTTGATCTTTTCTACGGGGTCTGAC |
| | GCTCAGTGGAACGAAAACTCACGTTAAGGGATTTTGGTCATGAGATTATCAAAAAGGATCTT |
| | CACCTAGATCCTTTTAAATTAAAAATGAAGTTTTAAATCAATCTAAAGTATATATGAGTAAAC |
| | TTGGTCTGACAGTTACCAATGCTTAATCAGTGAGGCACCTATCTCAGCGATCTGTCTATTTCGT |
| | TCATCCATAGTTGCCTGACTCCCCGTCGTGTAGATAACTACGATACGGGAGGGCTTACCATCT |
| | GGCCCCAGTGCTGCAATGATACCGCGAGACCCACGCTCACCGGCTCCAGATTTATCAGCAAT |
| | AAACCAGCCAGCCGGAAGGGCCGAGCGCAGAAGTGGTCCTGCAACTTTATCCGCCTCCATCC |
| | AGTCTATTAATTGTTGCCGGGAAGCTAGAGTAAGTAGTTCGCCAGTTAATAGTTTGCGCAACG |
| | TTGTTGCCATTGCTACAGGCATCGTGGTGTCACGCTCGTCGTTTGGTATGGCTTCATTCAGCTC |
| | CGGTTCCCAACGATCAAGGCGAGTTACATGATCCCCCATGTTGTGCAAAAAAGCGGTTAGCT |
| | CCTTCGGTCCTCCGATCGTTGTCAGAAGTAAGTTGGCCGCAGTGTTATCACTCATGGTTATGG |
| | CAGCACTGCATAATTCTCTTACTGTCATGCCATCCGTAAGATGCTTTTCTGTGACTGGTGAGTA |
| | CTCAACCAAGTCATTCTGAGAATAGTGTATGCGGCGACCGAGTTGCTCTTGCCCGGCGTCAAT |
| | ACGGGATAATACCGCGCCACATAGCAGAACTTTAAAAGTGCTCATCATTGGAAAACGTTCTT |
| | CGGGGCGAAAACTCTCAAGGATCTTACCGCTGTTGAGATCCAGTTCGATGTAACCCACTCGTG |
| | CACCCAACTGATCTTCAGCATCTTTTACTTTCACCAGCGTTTCTGGGTGAGCAAAAACAGGAA |
| | GGCAAAATGCCGCAAAAAAGGGAATAAGGGCGACACGGAAATGTTGAATACTCATACTCTTC |
| | CTTTTTCAATATTATTGAAGCATTTATCAGGGTTATTGTCTCATGAGCGGATACATATTTGAAT |
| | GTATTTAGAAAAATAAACAAATAGGGGTTCCGCGCACATTTCCCCGAAAAGTGCCACCTGGG |
| | TCGACATTGATTATTGACTAGTAATAGTAATCAATTACGGGGTCATTAGTTCATAGCCCATAT |
| | ATGGAGTTCCG (SEQ ID NO: 369) |
| IB20_pCM | CGTTACATAACTTACGGTAAATGGCCCGCCTGGCTGACCGCCCAACGACCCCCGCCCATTGAC |
| V-Cas5- | GTCAATAATGACGTATGTTCCCATAGTAACGCCAATAGGGACTTTCCATTGACGTCAATGGGT |
| NLS-HA | GGAGTATTTACGGTAAACTGCCCACTTGGCAGTACATCAAGTGTATCATATGCCAAGTACGCC |
| | CCCTATTGACGTCAATGACGGTAAATGGCCCGCCTGGCATTATGCCCAGTACATGACCTTATG |
| | GGACTTTCCTACTTGGCAGTACATCTACGTATTAGTCATCGCTATTACCATGGTGATGCGGTTT |
| | TGGCAGTACATCAATGGGCGTGGATAGCGGTTTGACTCACGGGGATTTCCAAGTCTCCACCCC |
| | ATTGACGTCAATGGGAGTTTGTTTTGGCACCAAAATCAACGGGACTTTCCAAAATGTCGTAAC |
| | AACTCCGCCCCATTGACGCAAATGGGCGGTAGGCGTGTACGGTGGGAGGTCTATATAAGCAG |
| | AGCTGGTTTAGTGAACCGTCAGATCCGCTAGCGCTACCGGACTCAGATCGCCACCATGATCGC |
| | CCCTCTGATCCTGTACCTGGACGTGCCCTTCACCACCTTCAGAGAGTCTCACGCCAGAGAGAT |
| | GGGCAAGACATACCCCGTTCCTCCACCAGCCACAGTGTACGGCATGCTGCTGTCTCTCGTGGG |
| | CGAGACAAACGTGTACAGACACTGCGGCGTGGAACTGGCCATTGCCATGCTGAGCAGCCCCA |
| | AGAAGTCCCGGATCCTGCGGCAGATGCGGAGATTCAAGAACGCCGACTTCTCTCACCCCGAG |
| | AACGTGATCCCTTGCTACCAAGAGATCCTGAGCAACCTGAAGTGCCTGATCTGGGTCCGAAG |
| | CGACGAGGAAAAGATCCAGCCTAGCCTGAGAGAGCGGATCCAGCTGGCCTTTGATCACCCTG |
| | AACTCGTCAGAAGATTCGGCTGCCTGTTCCTGGGCGAGAGCGACCAGCTGATCAAGACCATC |
| | AAGCTGGCCAGAGAGGACTACCTGGAAGGCGTTAGACAGTGGGCCATCCGGGACAACAGAG |
| | GCAGACTGACACTGCCCTATTGGGTCGACCACGTGGGCAGCAGAAATACCCGGTTCCTGAGA |
| | TACCGGATCGAGGAAATGGACCGGCTGAGCCCTCCTGACCTGGCTTGGACAATGGTGCAGAG |
| | CCCCATCGGAGGATCTGGCGGAGGCGGCTCTGGCGGCGGTGGAAGCGGAGGACCTAAGAAG |
| | AAGAGAAAAGTCTACCCCTACGACGTGCCAGACTACGCCTGACTAGCATAACCCCTTGGGGC |
| | GCACTCCTCAGGTGCAGGCTGCCTATCAGAAGGTGGTGGCTGGTGTGGCCAATGCCCTGGCTC |
| | ACAAATACCACTGAGATCTTTTTCCCTCTGCCAAAAATTATGGGGACATCATGAAGCCCCTTG |
| | AGCATCTGACTTCTGGCTAATAAAGGAAATTTATTTTCATTGCAATAGTGTGTTGGAATTTTTT |
| | GTGTCTCTCACTCGGAAGGACATATGGGAGGGCAAATCATTTAAAACATCAGAATGAGTATT |
| | TGGTTTAGAGTTTGGCAACATATGCCCATATGCTGGCTGCCATGAACAAAGGTTGGCTATAAA |
| | GAGGTCATCAGTATATGAAACAGCCCCCTGCTGTCCATTCCTTATTCCATAGAAAAGCCTTGA |
| | CTTGAGGTTAGATTTTTTTTATATTTTGTTTTGTGTTATTTTTTTCTTTAACATCCCTAAAATTTT |
| | CCTTACATGTTTTACTAGCCAGATTTTTCCTCCTCTCCTGACTACTCCCAGTCATAGCTGTCCC |
| | TCTTCTCTTATGGAGATCCCTCGACCTGCAGCCCAAGCTTGGCGTAATCATGGTCATAGCTGT |
| | TTCCTGTGTGAAATTGTTATCCGCTCACAATTCCACACAACATACGAGCCGGAAGCATAAAGT |
| | GTAAAGCCTGGGGTGCCTAATGAGTGAGCTAACTCACATTAATTGCGTTGCGCTCACTGCCCG |
| | CTTTCCAGTCGGGAAACCTGTCGTGCCAGCGGATCCGCATCTCAATTAGTCAGCAACCATAGT |
| | CCCGCCCCTAACTCCGCCCATCCCGCCCCTAACTCCGCCCAGTTCCGCCCATTCTCCGCCCCAT |
| | GGCTGACTAATTTTTTTTATTTATGCAGAGGCCGAGGCCGCCTCGGCCTCTGAGCTATTCCAG |
| | AAGTAGTGAGGAGGCTTTTTTGGAGGCCTAGGCTTTTGCAAAAAGCTAACTTGTTTATTGCAG |
| | CTTATAATGGTTACAAATAAAGCAATAGCATCACAAATTTCACAAATAAAGCATTTTTTTCAC |
| | TGCATTCTAGTTGTGGTTTGTCCAAACTCATCAATGTATCTTATCATGTCTGGATCCGCTGCAT |
| | TAATGAATCGGCCAACGCGCGGGGAGAGGCGGTTTGCGTATTGGGCGCTCTTCCGCTTCCTCG |
| | CTCACTGACTCGCTGCGCTCGGTCGTTCGGCTGCGGCGAGCGGTATCAGCTCACTCAAAGGCG |
| | GTAATACGGTTATCCACAGAATCAGGGGATAACGCAGGAAAGAACATGTGAGCAAAAGGCC |
| | AGCAAAAGGCCAGGAACCGTAAAAAGGCCGCGTTGCTGGCGTTTTTCCATAGGCTCCGCCCC |
| | CCTGACGAGCATCACAAAAATCGACGCTCAAGTCAGAGGTGGCGAAACCCGACAGGACTATA |
| | AAGATACCAGGCGTTTCCCCCTGGAAGCTCCCTCGTGCGCTCTCCTGTTCCGACCCTGCCGCT |
| | TACCGGATACCTGTCCGCCTTTCTCCCTTCGGGAAGCGTGGCGCTTTCTCATAGCTCACGCTGT |
| | AGGTATCTCAGTTCGGTGTAGGTCGTTCGCTCCAAGCTGGGCTGTGTGCACGAACCCCCCGTT |
| | CAGCCCGACCGCTGCGCCTTATCCGGTAACTATCGTCTTGAGTCCAACCCGGTAAGACACGAC |
| | TTATCGCCACTGGCAGCAGCCACTGGTAACAGGATTAGCAGAGCGAGGTATGTAGGCGGTGC |
| | TACAGAGTTCTTGAAGTGGTGGCCTAACTACGGCTACACTAGAAGAACAGTATTTGGTATCTG |
| | CGCTCTGCTGAAGCCAGTTACCTTCGGAAAAAGAGTTGGTAGCTCTTGATCCGGCAAACAAA |
| | CCACCGCTGGTAGCGGTGGTTTTTTTGTTTGCAAGCAGCAGATTACGCGCAGAAAAAAAGGA |
| | TCTCAAGAAGATCCTTTGATCTTTTCTACGGGGTCTGACGCTCAGTGGAACGAAAACTCACGT |
| | TAAGGGATTTTGGTCATGAGATTATCAAAAAGGATCTTCACCTAGATCCTTTTAAATTAAAAA |
| | TGAAGTTTTAAATCAATCTAAAGTATATATGAGTAAACTTGGTCTGACAGTTACCAATGCTTA |
| | ATCAGTGAGGCACCTATCTCAGCGATCTGTCTATTTCGTTCATCCATAGTTGCCTGACTCCCCG |
| | TCGTGTAGATAACTACGATACGGGAGGGCTTACCATCTGGCCCCAGTGCTGCAATGATACCG |
| | CGAGACCCACGCTCACCGGCTCCAGATTTATCAGCAATAAACCAGCCAGCCGGAAGGGCCGA |
| | GCGCAGAAGTGGTCCTGCAACTTTATCCGCCTCCATCCAGTCTATTAATTGTTGCCGGGAAGC |
| | TAGAGTAAGTAGTTCGCCAGTTAATAGTTTGCGCAACGTTGTTGCCATTGCTACAGGCATCGT |
| | GGTGTCACGCTCGTCGTTTGGTATGGCTTCATTCAGCTCCGGTTCCCAACGATCAAGGCGAGT |
| | TACATGATCCCCCATGTTGTGCAAAAAAGCGGTTAGCTCCTTCGGTCCTCCGATCGTTGTCAG |
| | AAGTAAGTTGGCCGCAGTGTTATCACTCATGGTTATGGCAGCACTGCATAATTCTCTTACTGT |
| | CATGCCATCCGTAAGATGCTTTTCTGTGACTGGTGAGTACTCAACCAAGTCATTCTGAGAATA |
| | GTGTATGCGGCGACCGAGTTGCTCTTGCCCGGCGTCAATACGGGATAATACCGCGCCACATA |
| | GCAGAACTTTAAAAGTGCTCATCATTGGAAAACGTTCTTCGGGGCGAAAACTCTCAAGGATC |
| | TTACCGCTGTTGAGATCCAGTTCGATGTAACCCACTCGTGCACCCAACTGATCTTCAGCATCT |
| | TTTACTTTCACCAGCGTTTCTGGGTGAGCAAAAACAGGAAGGCAAAATGCCGCAAAAAAGGG |
| | AATAAGGGCGACACGGAAATGTTGAATACTCATACTCTTCCTTTTTCAATATTATTGAAGCAT |
| | TTATCAGGGTTATTGTCTCATGAGCGGATACATATTTGAATGTATTTAGAAAAATAAACAAAT |
| | AGGGGTTCCGCGCACATTTCCCCGAAAAGTGCCACCTGGGTCGACATTGATTATTGACTAGTA |
| | ATAGTAATCAATTACGGGGTCATTAGTTCATAGCCCATATATGGAGTTCCG (SEQ ID NO: 370) |
| IB20_pCM | CGTTACATAACTTACGGTAAATGGCCCGCCTGGCTGACCGCCCAACGACCCCCGCCCATTGAC |
| V-Cas6- | GTCAATAATGACGTATGTTCCCATAGTAACGCCAATAGGGACTTTCCATTGACGTCAATGGGT |
| NLS-HA | GGAGTATTTACGGTAAACTGCCCACTTGGCAGTACATCAAGTGTATCATATGCCAAGTACGCC |
| | CCCTATTGACGTCAATGACGGTAAATGGCCCGCCTGGCATTATGCCCAGTACATGACCTTATG |
| | GGACTTTCCTACTTGGCAGTACATCTACGTATTAGTCATCGCTATTACCATGGTGATGCGGTTT |
| | TGGCAGTACATCAATGGGCGTGGATAGCGGTTTGACTCACGGGGATTTCCAAGTCTCCACCCC |
| | ATTGACGTCAATGGGAGTTTGTTTTGGCACCAAAATCAACGGGACTTTCCAAAATGTCGTAAC |
| | AACTCCGCCCCATTGACGCAAATGGGCGGTAGGCGTGTACGGTGGGAGGTCTATATAAGCAG |
| | AGCTGGTTTAGTGAACCGTCAGATCCGCTAGCGCTACCGGACTCAGATCGCCACCATGACCG |
| | CCATCCTGATCCAGAGCGAGGAATACGTGGACCTGACCTTCAAGCTGAGAGGCGCCCCTATT |
| | CCTCTGGACAACGGCTACCTGACATACGCCGCTCTGAGCAGAATCTGCCCTCCTCTGCACGAA |
| | CTGAAGTCCATCGGCATTCACCCTATCGCCGGCATTCCCACCAGAAACAACCTGCTGGAACTG |
| | ACAGCCCAGAGCCGGCTGAAGATCAGAATCTACCACCAGCAGATCCCTCTGATCTACCCCTA |
| | CCTGGCCGGACAGGCCTTTCACATCGGCCAGAACTTCTACCAGCTGGACATCCCCGACTACAA |
| | GCCCCTGATCAGCAGCGAGAGCGTGTACAGCAGACTGGTCATCATCAAGGGCTTCCAGGACA |
| | GCACCAACTTCATCGAGGCCGTGCAGCGGCAGATGGACAATCTGGGAATCCAGGGCAAGATC |
| | GAGCTGCTGACCAGACAGGATGGCACCCCTCAGAGAAGGCAGCTGACCATCAACAAAGAGG |
| | GCAAGCAGTTCAAAGTGCGCGGCTTCGGCGTGAAGATCTCCGAGCTGAACCCTGAGGACAGC |
| | CTGACACTGCAAGAGCAAGGCATCGGCGGCAAGCGGAAGATGATGTGCGGCATCTTTGTGCC |
| | CGCCACCAGATCCAAAGAGGAAGAGGAAACCGGAGGATCTGGCGGAGGCGGCTCTGGCGGC |
| | GGTGGAAGCGGAGGACCTAAGAAGAAGAGAAAAGTCTACCCCTACGACGTGCCAGACTACG |
| | CCTGACTAGCATAACCCCTTGGGGCGCACTCCTCAGGTGCAGGCTGCCTATCAGAAGGTGGT |
| | GGCTGGTGTGGCCAATGCCCTGGCTCACAAATACCACTGAGATCTTTTTCCCTCTGCCAAAAA |
| | TTATGGGGACATCATGAAGCCCCTTGAGCATCTGACTTCTGGCTAATAAAGGAAATTTATTTT |
| | CATTGCAATAGTGTGTTGGAATTTTTTGTGTCTCTCACTCGGAAGGACATATGGGAGGGCAAA |
| | TCATTTAAAACATCAGAATGAGTATTTGGTTTAGAGTTTGGCAACATATGCCCATATGCTGGC |
| | TGCCATGAACAAAGGTTGGCTATAAAGAGGTCATCAGTATATGAAACAGCCCCCTGCTGTCC |
| | ATTCCTTATTCCATAGAAAAGCCTTGACTTGAGGTTAGATTTTTTTTATATTTTGTTTTGTGTTA |
| | TTTTTTTCTTTAACATCCCTAAAATTTTCCTTACATGTTTTACTAGCCAGATTTTTCCTCCTCTC |
| | CTGACTACTCCCAGTCATAGCTGTCCCTCTTCTCTTATGGAGATCCCTCGACCTGCAGCCCAA |
| | GCTTGGCGTAATCATGGTCATAGCTGTTTCCTGTGTGAAATTGTTATCCGCTCACAATTCCACA |
| | CAACATACGAGCCGGAAGCATAAAGTGTAAAGCCTGGGGTGCCTAATGAGTGAGCTAACTCA |
| | CATTAATTGCGTTGCGCTCACTGCCCGCTTTCCAGTCGGGAAACCTGTCGTGCCAGCGGATCC |
| | GCATCTCAATTAGTCAGCAACCATAGTCCCGCCCCTAACTCCGCCCATCCCGCCCCTAACTCC |
| | GCCCAGTTCCGCCCATTCTCCGCCCCATGGCTGACTAATTTTTTTTATTTATGCAGAGGCCGAG |
| | GCCGCCTCGGCCTCTGAGCTATTCCAGAAGTAGTGAGGAGGCTTTTTTGGAGGCCTAGGCTTT |
| | TGCAAAAAGCTAACTTGTTTATTGCAGCTTATAATGGTTACAAATAAAGCAATAGCATCACAA |
| | ATTTCACAAATAAAGCATTTTTTTCACTGCATTCTAGTTGTGGTTTGTCCAAACTCATCAATGT |
| | ATCTTATCATGTCTGGATCCGCTGCATTAATGAATCGGCCAACGCGCGGGGAGAGGCGGTTTG |
| | CGTATTGGGCGCTCTTCCGCTTCCTCGCTCACTGACTCGCTGCGCTCGGTCGTTCGGCTGCGGC |
| | GAGCGGTATCAGCTCACTCAAAGGCGGTAATACGGTTATCCACAGAATCAGGGGATAACGCA |
| | GGAAAGAACATGTGAGCAAAAGGCCAGCAAAAGGCCAGGAACCGTAAAAAGGCCGCGTTGC |
| | TGGCGTTTTTCCATAGGCTCCGCCCCCCTGACGAGCATCACAAAAATCGACGCTCAAGTCAGA |
| | GGTGGCGAAACCCGACAGGACTATAAAGATACCAGGCGTTTCCCCCTGGAAGCTCCCTCGTG |
| | CGCTCTCCTGTTCCGACCCTGCCGCTTACCGGATACCTGTCCGCCTTTCTCCCTTCGGGAAGCG |
| | TGGCGCTTTCTCATAGCTCACGCTGTAGGTATCTCAGTTCGGTGTAGGTCGTTCGCTCCAAGCT |
| | GGGCTGTGTGCACGAACCCCCCGTTCAGCCCGACCGCTGCGCCTTATCCGGTAACTATCGTCT |
| | TGAGTCCAACCCGGTAAGACACGACTTATCGCCACTGGCAGCAGCCACTGGTAACAGGATTA |
| | GCAGAGCGAGGTATGTAGGCGGTGCTACAGAGTTCTTGAAGTGGTGGCCTAACTACGGCTAC |
| | ACTAGAAGAACAGTATTTGGTATCTGCGCTCTGCTGAAGCCAGTTACCTTCGGAAAAAGAGTT |
| | GGTAGCTCTTGATCCGGCAAACAAACCACCGCTGGTAGCGGTGGTTTTTTTGTTTGCAAGCAG |
| | CAGATTACGCGCAGAAAAAAAGGATCTCAAGAAGATCCTTTGATCTTTTCTACGGGGTCTGA |
| | CGCTCAGTGGAACGAAAACTCACGTTAAGGGATTTTGGTCATGAGATTATCAAAAAGGATCT |
| | TCACCTAGATCCTTTTAAATTAAAAATGAAGTTTTAAATCAATCTAAAGTATATATGAGTAAA |
| | CTTGGTCTGACAGTTACCAATGCTTAATCAGTGAGGCACCTATCTCAGCGATCTGTCTATTTC |
| | GTTCATCCATAGTTGCCTGACTCCCCGTCGTGTAGATAACTACGATACGGGAGGGCTTACCAT |
| | CTGGCCCCAGTGCTGCAATGATACCGCGAGACCCACGCTCACCGGCTCCAGATTTATCAGCA |
| | ATAAACCAGCCAGCCGGAAGGGCCGAGCGCAGAAGTGGTCCTGCAACTTTATCCGCCTCCAT |
| | CCAGTCTATTAATTGTTGCCGGGAAGCTAGAGTAAGTAGTTCGCCAGTTAATAGTTTGCGCAA |
| | CGTTGTTGCCATTGCTACAGGCATCGTGGTGTCACGCTCGTCGTTTGGTATGGCTTCATTCAGC |
| | TCCGGTTCCCAACGATCAAGGCGAGTTACATGATCCCCCATGTTGTGCAAAAAAGCGGTTAG |
| | CTCCTTCGGTCCTCCGATCGTTGTCAGAAGTAAGTTGGCCGCAGTGTTATCACTCATGGTTAT |
| | GGCAGCACTGCATAATTCTCTTACTGTCATGCCATCCGTAAGATGCTTTTCTGTGACTGGTGA |
| | GTACTCAACCAAGTCATTCTGAGAATAGTGTATGCGGCGACCGAGTTGCTCTTGCCCGGCGTC |
| | AATACGGGATAATACCGCGCCACATAGCAGAACTTTAAAAGTGCTCATCATTGGAAAACGTT |
| | CTTCGGGGCGAAAACTCTCAAGGATCTTACCGCTGTTGAGATCCAGTTCGATGTAACCCACTC |
| | GTGCACCCAACTGATCTTCAGCATCTTTTACTTTCACCAGCGTTTCTGGGTGAGCAAAAACAG |
| | GAAGGCAAAATGCCGCAAAAAAGGGAATAAGGGCGACACGGAAATGTTGAATACTCATACT |
| | CTTCCTTTTTCAATATTATTGAAGCATTTATCAGGGTTATTGTCTCATGAGCGGATACATATTT |
| | GAATGTATTTAGAAAAATAAACAAATAGGGGTTCCGCGCACATTTCCCCGAAAAGTGCCACC |
| | TGGGTCGACATTGATTATTGACTAGTAATAGTAATCAATTACGGGGTCATTAGTTCATAGCCC |
| | ATATATGGAGTTCCG (SEQ ID NO: 371) |
| IB20_pCM | CGTTACATAACTTACGGTAAATGGCCCGCCTGGCTGACCGCCCAACGACCCCCGCCCATTGAC |
| V-Cas7- | GTCAATAATGACGTATGTTCCCATAGTAACGCCAATAGGGACTTTCCATTGACGTCAATGGGT |
| NLS-HA | GGAGTATTTACGGTAAACTGCCCACTTGGCAGTACATCAAGTGTATCATATGCCAAGTACGCC |
| | CCCTATTGACGTCAATGACGGTAAATGGCCCGCCTGGCATTATGCCCAGTACATGACCTTATG |
| | GGACTTTCCTACTTGGCAGTACATCTACGTATTAGTCATCGCTATTACCATGGTGATGCGGTTT |
| | TGGCAGTACATCAATGGGCGTGGATAGCGGTTTGACTCACGGGGATTTCCAAGTCTCCACCCC |
| | ATTGACGTCAATGGGAGTTTGTTTTGGCACCAAAATCAACGGGACTTTCCAAAATGTCGTAAC |
| | AACTCCGCCCCATTGACGCAAATGGGCGGTAGGCGTGTACGGTGGGAGGTCTATATAAGCAG |
| | AGCTGGTTTAGTGAACCGTCAGATCCGCTAGCGCTACCGGACTCAGATCGCCACCATGATGA |
| | CCCAGAAGAAGAACGACAGCAACATCCCCAACTACTACCTGTACGGCACCGTGCTGACCAGA |
| | TACGGACTGGCCAGCCTGAACCACGACATCAGAAGAGGCAACAAGACCATCCTGCAGAAAG |
| | GCTACTGGAACAACGGCAAGATCCACAGCTTCGTGGGCAGCAGCGCCATTAGATGGGCCCTG |
| | AGGTTCTATCTGCAGAAACAGGGCTACCTGGTCAACAGAGTGTGGGACGAAGAGGAACACAT |
| | CAACAGACTGACCAGCGAGGACTTCGACCCCGAGAAGTTCTACGACGACGACATCTTCGGCT |
| | TCGCCCTGCTGGAAAGCGCCGAGACAGAGGAAGATACCAGCACCACCAAGCGGAAGAAGAA |
| | GCAGACCAAGACCAGCACACCCAACCAGAGAATGGGCGCCCTGGGCATGAATATGGCCGTGT |
| | CTCTGACCCCTTACGATGGCGCCGTGAAGCTGGGAGCCAAGTCTGGCAGAGAGAAGGACAGC |
| | ACCAGCCTGCACTTCACCGAGTACCACGCCACCAGATACCAGTACTACTTCGGCATCGACGCC |
| | ACACACCTGAAGGACTTCAGCCGGATCCTGCCTATGATCGACGGCATCATGAACCTGCCTAA |
| | AGTCGGCGGCAGCAGCAATATCTTCAACTACCCTTTCTGCCCCGACAGCCTGGTGTTCCAGTG |
| | GACCAATCACTTCGCCAGCTACATCAGCTACTGCTTCGAGTACTGCGACCCCAAGAGCAAAG |
| | AGGCCAAGCTGAGCCAAGAGTTCATCGACGAGGTGGAATGCGGCCAGATCGACCCTAGCAA |
| | ACTGTGGATCGGCGGCACCATCGTGAAGGACCTGCAGCAGCTGGACAACTTCGAGAGCAGCC |
| | CTCTGAACAAGGCCCACATCTACCGGAACCGGAACGAGATGATCGAGGCCCTGAAAACCGTG |
| | ATCAAGCGCGACCTGGGCCTCGAGGAATCCAAGGGAGGATCTGGCGGAGGCGGCTCTGGCG |
| | GCGGTGGAAGCGGAGGACCTAAGAAGAAGAGAAAAGTCTACCCCTACGACGTGCCAGACTA |
| | CGCCTGACTAGCATAACCCCTTGGGGCGCACTCCTCAGGTGCAGGCTGCCTATCAGAAGGTG |
| | GTGGCTGGTGTGGCCAATGCCCTGGCTCACAAATACCACTGAGATCTTTTTCCCTCTGCCAAA |
| | AATTATGGGGACATCATGAAGCCCCTTGAGCATCTGACTTCTGGCTAATAAAGGAAATTTATT |
| | TTCATTGCAATAGTGTGTTGGAATTTTTTGTGTCTCTCACTCGGAAGGACATATGGGAGGGCA |
| | AATCATTTAAAACATCAGAATGAGTATTTGGTTTAGAGTTTGGCAACATATGCCCATATGCTG |
| | GCTGCCATGAACAAAGGTTGGCTATAAAGAGGTCATCAGTATATGAAACAGCCCCCTGCTGT |
| | CCATTCCTTATTCCATAGAAAAGCCTTGACTTGAGGTTAGATTTTTTTTATATTTTGTTTTGTGT |
| | TATTTTTTTCTTTAACATCCCTAAAATTTTCCTTACATGTTTTACTAGCCAGATTTTTCCTCCTC |
| | TCCTGACTACTCCCAGTCATAGCTGTCCCTCTTCTCTTATGGAGATCCCTCGACCTGCAGCCCA |
| | AGCTTGGCGTAATCATGGTCATAGCTGTTTCCTGTGTGAAATTGTTATCCGCTCACAATTCCAC |
| | ACAACATACGAGCCGGAAGCATAAAGTGTAAAGCCTGGGGTGCCTAATGAGTGAGCTAACTC |
| | ACATTAATTGCGTTGCGCTCACTGCCCGCTTTCCAGTCGGGAAACCTGTCGTGCCAGCGGATC |
| | CGCATCTCAATTAGTCAGCAACCATAGTCCCGCCCCTAACTCCGCCCATCCCGCCCCTAACTC |
| | CGCCCAGTTCCGCCCATTCTCCGCCCCATGGCTGACTAATTTTTTTTATTTATGCAGAGGCCGA |
| | GGCCGCCTCGGCCTCTGAGCTATTCCAGAAGTAGTGAGGAGGCTTTTTTGGAGGCCTAGGCTT |
| | TTGCAAAAAGCTAACTTGTTTATTGCAGCTTATAATGGTTACAAATAAAGCAATAGCATCACA |
| | AATTTCACAAATAAAGCATTTTTTTCACTGCATTCTAGTTGTGGTTTGTCCAAACTCATCAATG |
| | TATCTTATCATGTCTGGATCCGCTGCATTAATGAATCGGCCAACGCGCGGGGAGAGGCGGTTT |
| | GCGTATTGGGCGCTCTTCCGCTTCCTCGCTCACTGACTCGCTGCGCTCGGTCGTTCGGCTGCGG |
| | CGAGCGGTATCAGCTCACTCAAAGGCGGTAATACGGTTATCCACAGAATCAGGGGATAACGC |
| | AGGAAAGAACATGTGAGCAAAAGGCCAGCAAAAGGCCAGGAACCGTAAAAAGGCCGCGTTG |
| | CTGGCGTTTTTCCATAGGCTCCGCCCCCCTGACGAGCATCACAAAAATCGACGCTCAAGTCAG |
| | AGGTGGCGAAACCCGACAGGACTATAAAGATACCAGGCGTTTCCCCCTGGAAGCTCCCTCGT |
| | GCGCTCTCCTGTTCCGACCCTGCCGCTTACCGGATACCTGTCCGCCTTTCTCCCTTCGGGAAGC |
| | GTGGCGCTTTCTCATAGCTCACGCTGTAGGTATCTCAGTTCGGTGTAGGTCGTTCGCTCCAAG |
| | CTGGGCTGTGTGCACGAACCCCCCGTTCAGCCCGACCGCTGCGCCTTATCCGGTAACTATCGT |
| | CTTGAGTCCAACCCGGTAAGACACGACTTATCGCCACTGGCAGCAGCCACTGGTAACAGGAT |
| | TAGCAGAGCGAGGTATGTAGGCGGTGCTACAGAGTTCTTGAAGTGGTGGCCTAACTACGGCT |
| | ACACTAGAAGAACAGTATTTGGTATCTGCGCTCTGCTGAAGCCAGTTACCTTCGGAAAAAGA |
| | GTTGGTAGCTCTTGATCCGGCAAACAAACCACCGCTGGTAGCGGTGGTTTTTTTGTTTGCAAG |
| | CAGCAGATTACGCGCAGAAAAAAAGGATCTCAAGAAGATCCTTTGATCTTTTCTACGGGGTC |
| | TGACGCTCAGTGGAACGAAAACTCACGTTAAGGGATTTTGGTCATGAGATTATCAAAAAGGA |
| | TCTTCACCTAGATCCTTTTAAATTAAAAATGAAGTTTTAAATCAATCTAAAGTATATATGAGT |
| | AAACTTGGTCTGACAGTTACCAATGCTTAATCAGTGAGGCACCTATCTCAGCGATCTGTCTAT |
| | TTCGTTCATCCATAGTTGCCTGACTCCCCGTCGTGTAGATAACTACGATACGGGAGGGCTTAC |
| | CATCTGGCCCCAGTGCTGCAATGATACCGCGAGACCCACGCTCACCGGCTCCAGATTTATCAG |
| | CAATAAACCAGCCAGCCGGAAGGGCCGAGCGCAGAAGTGGTCCTGCAACTTTATCCGCCTCC |
| | ATCCAGTCTATTAATTGTTGCCGGGAAGCTAGAGTAAGTAGTTCGCCAGTTAATAGTTTGCGC |
| | AACGTTGTTGCCATTGCTACAGGCATCGTGGTGTCACGCTCGTCGTTTGGTATGGCTTCATTCA |
| | GCTCCGGTTCCCAACGATCAAGGCGAGTTACATGATCCCCCATGTTGTGCAAAAAAGCGGTT |
| | AGCTCCTTCGGTCCTCCGATCGTTGTCAGAAGTAAGTTGGCCGCAGTGTTATCACTCATGGTT |
| | ATGGCAGCACTGCATAATTCTCTTACTGTCATGCCATCCGTAAGATGCTTTTCTGTGACTGGTG |
| | AGTACTCAACCAAGTCATTCTGAGAATAGTGTATGCGGCGACCGAGTTGCTCTTGCCCGGCGT |
| | CAATACGGGATAATACCGCGCCACATAGCAGAACTTTAAAAGTGCTCATCATTGGAAAACGT |
| | TCTTCGGGGCGAAAACTCTCAAGGATCTTACCGCTGTTGAGATCCAGTTCGATGTAACCCACT |
| | CGTGCACCCAACTGATCTTCAGCATCTTTTACTTTCACCAGCGTTTCTGGGTGAGCAAAAACA |
| | GGAAGGCAAAATGCCGCAAAAAAGGGAATAAGGGCGACACGGAAATGTTGAATACTCATAC |
| | TCTTCCTTTTTCAATATTATTGAAGCATTTATCAGGGTTATTGTCTCATGAGCGGATACATATT |
| | TGAATGTATTTAGAAAAATAAACAAATAGGGGTTCCGCGCACATTTCCCCGAAAAGTGCCAC |
| | CTGGGTCGACATTGATTATTGACTAGTAATAGTAATCAATTACGGGGTCATTAGTTCATAGCC |
| | CATATATGGAGTTCCG (SEQ ID NO: 372) |
| BB20_pCM | CGTTACATAACTTACGGTAAATGGCCCGCCTGGCTGACCGCCCAACGACCCCCGCCCATTGAC |
| V-Cas8- | GTCAATAATGACGTATGTTCCCATAGTAACGCCAATAGGGACTTTCCATTGACGTCAATGGGT |
| NLS-HA | GGAGTATTTACGGTAAACTGCCCACTTGGCAGTACATCAAGTGTATCATATGCCAAGTACGCC |
| | CCCTATTGACGTCAATGACGGTAAATGGCCCGCCTGGCATTATGCCCAGTACATGACCTTATG |
| | GGACTTTCCTACTTGGCAGTACATCTACGTATTAGTCATCGCTATTACCATGGTGATGCGGTTT |
| | TGGCAGTACATCAATGGGCGTGGATAGCGGTTTGACTCACGGGGATTTCCAAGTCTCCACCCC |
| | ATTGACGTCAATGGGAGTTTGTTTTGGCACCAAAATCAACGGGACTTTCCAAAATGTCGTAAC |
| | AACTCCGCCCCATTGACGCAAATGGGCGGTAGGCGTGTACGGTGGGAGGTCTATATAAGCAG |
| | AGCTGGTTTAGTGAACCGTCAGATCCGCTAGCGCTACCGGACTCAGATCGCCACCATGATCGT |
| | GTCCACACAGCCCAAGATCAGCCTGTCTCTGCACGCCGCCGATACCACCATCATGCACAGAG |
| | TGGGCATGACCGGCCTGTACATGACCCTGAAGCGGCTGGAAAAGCAGTACCCTCTGAGCAGA |
| | CAGAGAGGCGGCCACATCAGCTGGTTTCTGACCGCCGACACCATCGAGCTGTTTTGGGAGGG |
| | CAGCGACTTTATCGCCCTGAGCTGGCTGATCAACGAGAGCTTTCAGCTGGACGACACCGGCCT |
| | GATCCACCTCGTTGGCCTGGACAACGACCGGATCGACCTGAGACAGAAGATCCACATCCACG |
| | AGGGAATCTGCGGCGTGTTCCTGCGGCTGAACAAGTTTTACCAGGCCGGCGAGATCATCAAC |
| | ACCGAGCTGAGATTCGAAGAGAAGCAGGTCGAGTACCAGTACAAGAGCCTGACTTGGTACGC |
| | CCACCAGACCTTCGCCGAGAAGCTGTGCGAAGCCGATACACAGCAGCTGCGGCACGACTACA |
| | TCCAGATCACCAGCTGGCTGTACCTCGGCGGAATTGTGCGGCATGCCAGAACACAGAACACC |
| | ACCAAGCTGGAAGAGAAACCCGAGTACGCCCTGGCTCTGCTGTTTGTGCCTGTCGTGTGCCAC |
| | TACTGCCTGCTGCACATCCCTAGCGAGGACCTGAAAGAGCGGAAGCCCCACAGATACCTGGT |
| | GGTCATCCCCGAGATCAAGGACTTCGAGGATGCCAGCCAGAGAAGATGGCGGCTGCAGCAGC |
| | TGGAAACAAAGCAGTTCCACGTGTCCAGCCTGGGCGAAGCCGGCCTGCTGTACTACAGCCTG |
| | GATGACATTCAGCCCGAGGTGGCCTACTACCAGGCCTGTCAAGTGTGGCTGTACGAAAAGAC |
| | CAACAAGGCCAGCCGGCAGCGGACCCTGATGAGCATCGAGGAAATCAAGATCGACAAGAAC |
| | ATCCTCATCACCTACCAGCAGGTCCAGAAGTACTTTAAGACCAACTACCAGATCATTAAGTAC |
| | AAGCAGATCTTCATCAAAGTGAACCCCATTCGGAGCCTGATCGCCGACAATCTGGTCAAGGG |
| | AATCCACTGGTGGTCCAATTTCTGGGAGAAGCTGGTCATCGAGGACAGCAAAGAGTACCTGT |
| | TCAACCAGCTGTTCAGCAACCGCGAGGGCTTCATCATCATGGCCGAGAACAGCGAAGAGGAC |
| | AAGCAGTATCTGATCTTTATCAAGGTGTTCCAGCAGGCCATGAAGGGCAACTTCGCCAAGAT |
| | CTACGCCAAGACCGAGGAAGGCAAGGACCCTCCTATCAAGAAAAAGGTGGAACGGCTGCGG |
| | GCCGAGCTGAACTACTGTTACGATGAGCTGAGCTTCAAAGAATACCTGAGCGACTTCCTCGTC |
| | AGAGGCGGACTGAACAAATACTTCAACGAGCACCAAGAGGAAATCGCCCTGCTGATCAAGA |
| | AGTCCCCTTGGCAAGAGATCAGAATCTGGTCCCTGCTGGCCATTGCCAGCTACAAGCCCAAG |
| | GACAAGCTGACCAACCGGGACGATAGCAGCCTGAGCAACAACCAGAAACTGGAAGAAGTGA |
| | ACGACGACAGCGAGGAAGAGGGAGGATCTGGCGGAGGCGGCTCTGGCGGCGGTGGAAGCGG |
| | AGGACCTAAGAAGAAGAGAAAAGTCTACCCCTACGACGTGCCAGACTACGCCTGACTAGCAT |
| | AACCCCTTGGGGCGCACTCCTCAGGTGCAGGCTGCCTATCAGAAGGTGGTGGCTGGTGTGGC |
| | CAATGCCCTGGCTCACAAATACCACTGAGATCTTTTTCCCTCTGCCAAAAATTATGGGGACAT |
| | CATGAAGCCCCTTGAGCATCTGACTTCTGGCTAATAAAGGAAATTTATTTTCATTGCAATAGT |
| | GTGTTGGAATTTTTTGTGTCTCTCACTCGGAAGGACATATGGGAGGGCAAATCATTTAAAACA |
| | TCAGAATGAGTATTTGGTTTAGAGTTTGGCAACATATGCCCATATGCTGGCTGCCATGAACAA |
| | AGGTTGGCTATAAAGAGGTCATCAGTATATGAAACAGCCCCCTGCTGTCCATTCCTTATTCCA |
| | TAGAAAAGCCTTGACTTGAGGTTAGATTTTTTTTATATTTTGTTTTGTGTTATTTTTTTCTTTAA |
| | CATCCCTAAAATTTTCCTTACATGTTTTACTAGCCAGATTTTTCCTCCTCTCCTGACTACTCCCA |
| | GTCATAGCTGTCCCTCTTCTCTTATGGAGATCCCTCGACCTGCAGCCCAAGCTTGGCGTAATC |
| | ATGGTCATAGCTGTTTCCTGTGTGAAATTGTTATCCGCTCACAATTCCACACAACATACGAGC |
| | CGGAAGCATAAAGTGTAAAGCCTGGGGTGCCTAATGAGTGAGCTAACTCACATTAATTGCGT |
| | TGCGCTCACTGCCCGCTTTCCAGTCGGGAAACCTGTCGTGCCAGCGGATCCGCATCTCAATTA |
| | GTCAGCAACCATAGTCCCGCCCCTAACTCCGCCCATCCCGCCCCTAACTCCGCCCAGTTCCGC |
| | CCATTCTCCGCCCCATGGCTGACTAATTTTTTTTATTTATGCAGAGGCCGAGGCCGCCTCGGCC |
| | TCTGAGCTATTCCAGAAGTAGTGAGGAGGCTTTTTTGGAGGCCTAGGCTTTTGCAAAAAGCTA |
| | ACTTGTTTATTGCAGCTTATAATGGTTACAAATAAAGCAATAGCATCACAAATTTCACAAATA |
| | AAGCATTTTTTTCACTGCATTCTAGTTGTGGTTTGTCCAAACTCATCAATGTATCTTATCATGT |
| | CTGGATCCGCTGCATTAATGAATCGGCCAACGCGCGGGGAGAGGCGGTTTGCGTATTGGGCG |
| | CTCTTCCGCTTCCTCGCTCACTGACTCGCTGCGCTCGGTCGTTCGGCTGCGGCGAGCGGTATC |
| | AGCTCACTCAAAGGCGGTAATACGGTTATCCACAGAATCAGGGGATAACGCAGGAAAGAAC |
| | ATGTGAGCAAAAGGCCAGCAAAAGGCCAGGAACCGTAAAAAGGCCGCGTTGCTGGCGTTTTT |
| | CCATAGGCTCCGCCCCCCTGACGAGCATCACAAAAATCGACGCTCAAGTCAGAGGTGGCGAA |
| | ACCCGACAGGACTATAAAGATACCAGGCGTTTCCCCCTGGAAGCTCCCTCGTGCGCTCTCCTG |
| | TTCCGACCCTGCCGCTTACCGGATACCTGTCCGCCTTTCTCCCTTCGGGAAGCGTGGCGCTTTC |
| | TCATAGCTCACGCTGTAGGTATCTCAGTTCGGTGTAGGTCGTTCGCTCCAAGCTGGGCTGTGT |
| | GCACGAACCCCCCGTTCAGCCCGACCGCTGCGCCTTATCCGGTAACTATCGTCTTGAGTCCAA |
| | CCCGGTAAGACACGACTTATCGCCACTGGCAGCAGCCACTGGTAACAGGATTAGCAGAGCGA |
| | GGTATGTAGGCGGTGCTACAGAGTTCTTGAAGTGGTGGCCTAACTACGGCTACACTAGAAGA |
| | ACAGTATTTGGTATCTGCGCTCTGCTGAAGCCAGTTACCTTCGGAAAAAGAGTTGGTAGCTCT |
| | TGATCCGGCAAACAAACCACCGCTGGTAGCGGTGGTTTTTTTGTTTGCAAGCAGCAGATTACG |
| | CGCAGAAAAAAAGGATCTCAAGAAGATCCTTTGATCTTTTCTACGGGGTCTGACGCTCAGTG |
| | GAACGAAAACTCACGTTAAGGGATTTTGGTCATGAGATTATCAAAAAGGATCTTCACCTAGA |
| | TCCTTTTAAATTAAAAATGAAGTTTTAAATCAATCTAAAGTATATATGAGTAAACTTGGTCTG |
| | ACAGTTACCAATGCTTAATCAGTGAGGCACCTATCTCAGCGATCTGTCTATTTCGTTCATCCAT |
| | AGTTGCCTGACTCCCCGTCGTGTAGATAACTACGATACGGGAGGGCTTACCATCTGGCCCCAG |
| | TGCTGCAATGATACCGCGAGACCCACGCTCACCGGCTCCAGATTTATCAGCAATAAACCAGC |
| | CAGCCGGAAGGGCCGAGCGCAGAAGTGGTCCTGCAACTTTATCCGCCTCCATCCAGTCTATTA |
| | ATTGTTGCCGGGAAGCTAGAGTAAGTAGTTCGCCAGTTAATAGTTTGCGCAACGTTGTTGCCA |
| | TTGCTACAGGCATCGTGGTGTCACGCTCGTCGTTTGGTATGGCTTCATTCAGCTCCGGTTCCCA |
| | ACGATCAAGGCGAGTTACATGATCCCCCATGTTGTGCAAAAAAGCGGTTAGCTCCTTCGGTCC |
| | TCCGATCGTTGTCAGAAGTAAGTTGGCCGCAGTGTTATCACTCATGGTTATGGCAGCACTGCA |
| | TAATTCTCTTACTGTCATGCCATCCGTAAGATGCTTTTCTGTGACTGGTGAGTACTCAACCAAG |
| | TCATTCTGAGAATAGTGTATGCGGCGACCGAGTTGCTCTTGCCCGGCGTCAATACGGGATAAT |
| | ACCGCGCCACATAGCAGAACTTTAAAAGTGCTCATCATTGGAAAACGTTCTTCGGGGCGAAA |
| | ACTCTCAAGGATCTTACCGCTGTTGAGATCCAGTTCGATGTAACCCACTCGTGCACCCAACTG |
| | ATCTTCAGCATCTTTTACTTTCACCAGCGTTTCTGGGTGAGCAAAAACAGGAAGGCAAAATGC |
| | CGCAAAAAAGGGAATAAGGGCGACACGGAAATGTTGAATACTCATACTCTTCCTTTTTCAAT |
| | ATTATTGAAGCATTTATCAGGGTTATTGTCTCATGAGCGGATACATATTTGAATGTATTTAGA |
| | AAAATAAACAAATAGGGGTTCCGCGCACATTTCCCCGAAAAGTGCCACCTGGGTCGACATTG |
| | ATTATTGACTAGTAATAGTAATCAATTACGGGGTCATTAGTTCATAGCCCATATATGGAGTTC |
| | CG (SEQ ID NO: 373) |
| IB20_pCM | CGTTACATAACTTACGGTAAATGGCCCGCCTGGCTGACCGCCCAACGACCCCCGCCCATTGAC |
| V-TnsD1- | GTCAATAATGACGTATGTTCCCATAGTAACGCCAATAGGGACTTTCCATTGACGTCAATGGGT |
| NLS-HA | GGAGTATTTACGGTAAACTGCCCACTTGGCAGTACATCAAGTGTATCATATGCCAAGTACGCC |
| | CCCTATTGACGTCAATGACGGTAAATGGCCCGCCTGGCATTATGCCCAGTACATGACCTTATG |
| | GGACTTTCCTACTTGGCAGTACATCTACGTATTAGTCATCGCTATTACCATGGTGATGCGGTTT |
| | TGGCAGTACATCAATGGGCGTGGATAGCGGTTTGACTCACGGGGATTTCCAAGTCTCCACCCC |
| | ATTGACGTCAATGGGAGTTTGTTTTGGCACCAAAATCAACGGGACTTTCCAAAATGTCGTAAC |
| | AACTCCGCCCCATTGACGCAAATGGGCGGTAGGCGTGTACGGTGGGAGGTCTATATAAGCAG |
| | AGCTGGTTTAGTGAACCGTCAGATCCGCTAGCGCTACCGGACTCAGATCGCCACCATGACCAT |
| | CTACAGCGAGCACTGGTCCCTGAATCCTCTGGAAATCCCTCAGCGGAGCCGGCTGTTTAGCCT |
| | GGAACCTGTGGCTGTGGGCACACCTTATGCCGAGAGCCTGAGCAGCTACCTGCACAGACTGG |
| | CCCAGGCTCACTGTCTGACAAGCGAGAAGCTGGTCATGGGCGAGATCGCCCCTCTGATCCTG |
| | AAGGACGAGGACAAGAGCGAGCTGCTGAGCAAGAACCTGAGCCATCTGCTGGGCAACAGCG |
| | ACGCCAAGCCTGCCATCAATGGCATGAGAGAGATGACCGAGAAGCTCGTGACCGTGCTGGAA |
| | GAACTGACCATGCGGCAGGACCTGCGGTTTCTGACACTGCTGTCTTGGAAGGGCATGATCTAC |
| | GACAAGGGCCTGTTCCGCAACTACAGAGCCTGGTGTCCTTGCTGCTGCGAGGAATGGATGCA |
| | GAAGAACAAGACAATCTACGAGCCCCTGAGCTGGTCCTTCAAGGACGTGGAATTCTGCCTGA |
| | TCCACAAGCAGCGGCTGATCGAGGAATGCAGCCATTGTGGCGCTAGACTGCCCGTGATGGCC |
| | AGACTTTCTCCTGCCGGCTTCTGCAGCAGATGCTATGGCTGGCTGGGCCAAGAGATCAAGGG |
| | CGAAGAGGAAATCGAGAAGTACCGCGTGAACATCCAGGGCATCTCCGAGCTGATTGCCCTGA |
| | CACCTCAGCTGGGCTACAAGCCCATTCCTATCGAGCTGACCCGGAAACTGCAGCTGATCCTGC |
| | TGGTGTTCGAGCAGGCCATCGGCAAGGATGTGAAGCTGCTGGGAGATCTCGGCGGCATCATG |
| | GAAAGCCTGAGAATCGCCAGCACCACCAACCAGAGCCAGCCTTACCACCTGGTCAAGCTGAT |
| | CATCCCCGTGTGCGAGAAGGCCAAGATCAGCGTGTTCCAGCTGTTCGGCAGCGACTTCAAAG |
| | AGCTGGGCAAGATCCTGTTTGGCAACTTCTCCCTGGAACTGAAACTGGGAGGATCTGGCGGA |
| | GGCGGCTCTGGCGGCGGTGGAAGCGGAGGACCTAAGAAGAAGAGAAAAGTCTACCCCTACG |
| | ACGTGCCAGACTACGCCTGACTAGCATAACCCCTTGGGGCGCACTCCTCAGGTGCAGGCTGC |
| | CTATCAGAAGGTGGTGGCTGGTGTGGCCAATGCCCTGGCTCACAAATACCACTGAGATCTTTT |
| | TCCCTCTGCCAAAAATTATGGGGACATCATGAAGCCCCTTGAGCATCTGACTTCTGGCTAATA |
| | AAGGAAATTTATTTTCATTGCAATAGTGTGTTGGAATTTTTTGTGTCTCTCACTCGGAAGGAC |
| | ATATGGGAGGGCAAATCATTTAAAACATCAGAATGAGTATTTGGTTTAGAGTTTGGCAACAT |
| | ATGCCCATATGCTGGCTGCCATGAACAAAGGTTGGCTATAAAGAGGTCATCAGTATATGAAA |
| | CAGCCCCCTGCTGTCCATTCCTTATTCCATAGAAAAGCCTTGACTTGAGGTTAGATTTTTTTTA |
| | TATTTTGTTTTGTGTTATTTTTTTCTTTAACATCCCTAAAATTTTCCTTACATGTTTTACTAGCC |
| | AGATTTTTCCTCCTCTCCTGACTACTCCCAGTCATAGCTGTCCCTCTTCTCTTATGGAGATCCC |
| | TCGACCTGCAGCCCAAGCTTGGCGTAATCATGGTCATAGCTGTTTCCTGTGTGAAATTGTTAT |
| | CCGCTCACAATTCCACACAACATACGAGCCGGAAGCATAAAGTGTAAAGCCTGGGGTGCCTA |
| | ATGAGTGAGCTAACTCACATTAATTGCGTTGCGCTCACTGCCCGCTTTCCAGTCGGGAAACCT |
| | GTCGTGCCAGCGGATCCGCATCTCAATTAGTCAGCAACCATAGTCCCGCCCCTAACTCCGCCC |
| | ATCCCGCCCCTAACTCCGCCCAGTTCCGCCCATTCTCCGCCCCATGGCTGACTAATTTTTTTTA |
| | TTTATGCAGAGGCCGAGGCCGCCTCGGCCTCTGAGCTATTCCAGAAGTAGTGAGGAGGCTTTT |
| | TTGGAGGCCTAGGCTTTTGCAAAAAGCTAACTTGTTTATTGCAGCTTATAATGGTTACAAATA |
| | AAGCAATAGCATCACAAATTTCACAAATAAAGCATTTTTTTCACTGCATTCTAGTTGTGGTTT |
| | GTCCAAACTCATCAATGTATCTTATCATGTCTGGATCCGCTGCATTAATGAATCGGCCAACGC |
| | GCGGGGAGAGGCGGTTTGCGTATTGGGCGCTCTTCCGCTTCCTCGCTCACTGACTCGCTGCGC |
| | TCGGTCGTTCGGCTGCGGCGAGCGGTATCAGCTCACTCAAAGGCGGTAATACGGTTATCCAC |
| | AGAATCAGGGGATAACGCAGGAAAGAACATGTGAGCAAAAGGCCAGCAAAAGGCCAGGAA |
| | CCGTAAAAAGGCCGCGTTGCTGGCGTTTTTCCATAGGCTCCGCCCCCCTGACGAGCATCACAA |
| | AAATCGACGCTCAAGTCAGAGGTGGCGAAACCCGACAGGACTATAAAGATACCAGGCGTTTC |
| | CCCCTGGAAGCTCCCTCGTGCGCTCTCCTGTTCCGACCCTGCCGCTTACCGGATACCTGTCCGC |
| | CTTTCTCCCTTCGGGAAGCGTGGCGCTTTCTCATAGCTCACGCTGTAGGTATCTCAGTTCGGTG |
| | TAGGTCGTTCGCTCCAAGCTGGGCTGTGTGCACGAACCCCCCGTTCAGCCCGACCGCTGCGCC |
| | TTATCCGGTAACTATCGTCTTGAGTCCAACCCGGTAAGACACGACTTATCGCCACTGGCAGCA |
| | GCCACTGGTAACAGGATTAGCAGAGCGAGGTATGTAGGCGGTGCTACAGAGTTCTTGAAGTG |
| | GTGGCCTAACTACGGCTACACTAGAAGAACAGTATTTGGTATCTGCGCTCTGCTGAAGCCAGT |
| | TACCTTCGGAAAAAGAGTTGGTAGCTCTTGATCCGGCAAACAAACCACCGCTGGTAGCGGTG |
| | GTTTTTTTGTTTGCAAGCAGCAGATTACGCGCAGAAAAAAAGGATCTCAAGAAGATCCTTTGA |
| | TCTTTTCTACGGGGTCTGACGCTCAGTGGAACGAAAACTCACGTTAAGGGATTTTGGTCATGA |
| | GATTATCAAAAAGGATCTTCACCTAGATCCTTTTAAATTAAAAATGAAGTTTTAAATCAATCT |
| | AAAGTATATATGAGTAAACTTGGTCTGACAGTTACCAATGCTTAATCAGTGAGGCACCTATCT |
| | CAGCGATCTGTCTATTTCGTTCATCCATAGTTGCCTGACTCCCCGTCGTGTAGATAACTACGAT |
| | ACGGGAGGGCTTACCATCTGGCCCCAGTGCTGCAATGATACCGCGAGACCCACGCTCACCGG |
| | CTCCAGATTTATCAGCAATAAACCAGCCAGCCGGAAGGGCCGAGCGCAGAAGTGGTCCTGCA |
| | ACTTTATCCGCCTCCATCCAGTCTATTAATTGTTGCCGGGAAGCTAGAGTAAGTAGTTCGCCA |
| | GTTAATAGTTTGCGCAACGTTGTTGCCATTGCTACAGGCATCGTGGTGTCACGCTCGTCGTTT |
| | GGTATGGCTTCATTCAGCTCCGGTTCCCAACGATCAAGGCGAGTTACATGATCCCCCATGTTG |
| | TGCAAAAAAGCGGTTAGCTCCTTCGGTCCTCCGATCGTTGTCAGAAGTAAGTTGGCCGCAGTG |
| | TTATCACTCATGGTTATGGCAGCACTGCATAATTCTCTTACTGTCATGCCATCCGTAAGATGCT |
| | TTTCTGTGACTGGTGAGTACTCAACCAAGTCATTCTGAGAATAGTGTATGCGGCGACCGAGTT |
| | GCTCTTGCCCGGCGTCAATACGGGATAATACCGCGCCACATAGCAGAACTTTAAAAGTGCTC |
| | ATCATTGGAAAACGTTCTTCGGGGCGAAAACTCTCAAGGATCTTACCGCTGTTGAGATCCAGT |
| | TCGATGTAACCCACTCGTGCACCCAACTGATCTTCAGCATCTTTTACTTTCACCAGCGTTTCTG |
| | GGTGAGCAAAAACAGGAAGGCAAAATGCCGCAAAAAAGGGAATAAGGGCGACACGGAAAT |
| | GTTGAATACTCATACTCTTCCTTTTTCAATATTATTGAAGCATTTATCAGGGTTATTGTCTCAT |
| | GAGCGGATACATATTTGAATGTATTTAGAAAAATAAACAAATAGGGGTTCCGCGCACATTTC |
| | CCCGAAAAGTGCCACCTGGGTCGACATTGATTATTGACTAGTAATAGTAATCAATTACGGGGT |
| | CATTAGTTCATAGCCCATATATGGAGTTCCG (SEQ ID NO: 374) |
| IB20_pCM | CGTTACATAACTTACGGTAAATGGCCCGCCTGGCTGACCGCCCAACGACCCCCGCCCATTGAC |
| V-TnsAB- | GTCAATAATGACGTATGTTCCCATAGTAACGCCAATAGGGACTTTCCATTGACGTCAATGGGT |
| NLS-HA | GGAGTATTTACGGTAAACTGCCCACTTGGCAGTACATCAAGTGTATCATATGCCAAGTACGCC |
| | CCCTATTGACGTCAATGACGGTAAATGGCCCGCCTGGCATTATGCCCAGTACATGACCTTATG |
| | GGACTTTCCTACTTGGCAGTACATCTACGTATTAGTCATCGCTATTACCATGGTGATGCGGTTT |
| | TGGCAGTACATCAATGGGCGTGGATAGCGGTTTGACTCACGGGGATTTCCAAGTCTCCACCCC |
| | ATTGACGTCAATGGGAGTTTGTTTTGGCACCAAAATCAACGGGACTTTCCAAAATGTCGTAAC |
| | AACTCCGCCCCATTGACGCAAATGGGCGGTAGGCGTGTACGGTGGGAGGTCTATATAAGCAG |
| | AGCTGGTTTAGTGAACCGTCAGATCCGCTAGCGCTACCGGACTCAGATCGCCACCATGAAGG |
| | AACAGTTCGAGCAGTGGGTCGCCCGGCTGCAGATTTCTGAAGCCGGCCAGAAAATCATCGAG |
| | AAAGTGCGGAGCAGCGAGCCCAGCAGAAGAGTTGGCGGAGGCAGCAAGAATGTGTCCGGCA |
| | GATACCCCTCCAGAAAGATGGGCGTGACCATCCAGTTCGAGAGCCACAGAGTGGAACTGCCC |
| | ATCATCTACCAGCTGGAACACGACAAGGACGTGCTGGAATTCTACGACCAGCCTCCTCAGAT |
| | CAAGCTGGACTACCAGGCCAGCAATGGCAGACGACTGGGAGTGCTGCACACCCCTGATCTGT |
| | TCGTGATCAGGACCAATAGCGCCGGCTGGGAAGAGTGCAAGACCGAGCAGGATCTGAAGAA |
| | GCTGGCCGAGAAGAACCCCAACCGGTACTTCTACAGCGAAGAGAACAACCAGTGGCACAGC |
| | CTGCCTGGCGAGGTGTACGCCAATCAGTTTGGCCTGTACCACCGGATCCACAGCGACCGCGA |
| | AATCAACTGGGTGCTGCAGCGGAACCTGCAGTTCCTGGAAGATTACTACCGCAGCGAGAGCC |
| | TGGTGGTGGAAGAGGCCATTGCTCAGTCTCTGCTGGCCATCGTGTCTAGCCAGCCTGGAATTA |
| | CACTGGCCGAGCTGCTGAACAGAAGCACCGGCGCCAAGAGCGACGACATCTACACCCTGATC |
| | ATCCAAGAGCAGATCTACATCGACCTGAACGCCACACCTCTGGCTGAGCCTGAGAGATGCCT |
| | GATCTTCAGGGATGAGCAGACCGCCAGCGCCTACAGACTGATGGTTGAGCAGCCTAGCGTGT |
| | CCCTGCCTGCCATCTCTCCCGTGGTCAATATTGTGACAGGCGCCACCGTGTCCTGGGATGGCA |
| | AGGGCCTGAATATCATCCACGTGGGCGAGACAGAAGTGATCCTGGGCGCCGAGAACAATCAG |
| | CTCATCGAACTGAAGAAGGCCATCTTCGAGAACCTCGTGCGGCAGGGCAAGATCACCTCTCT |
| | GCAGACCCCAGAGAAAACCGCCATCAGCACAGAGAGCTGGCAGCGGTTTCATCAGGCCTCTC |
| | CAGAGGATCAGGCCGAGGCTCTGGAACGGTACAAGACCATCGAGCCCTACCTGAACGGACAC |
| | CCTCCTGAGAACGAGACAATCCCCGCCAGAACCATCAGACACTGGAAGGCCAAGTACCTGAT |
| | CGCCATCCAGAAGTACGGCTGCGGCTATATCGGCCTGCTGTCCCACAGAAGCGTGAAGGGCA |
| | ACAGACAGAGAAAGCTGCCCGAGGACACCCTGGCCATCATGGAAAAGTTCATTCTCGAGGAC |
| | TACGAGACACTGAAGCAGAAACGGATGTGGGAAGTGCACGCCGCTCTCGTGCGAGCTTGTGA |
| | AGAAGCAGGCGTTATCGCCCCTAGCTACAAGGCCTTCACCAAAGAGGTGCAGCGGAGAACCG |
| | GCTACGAGCAGACCAAGAAGAGACAAGGCAGAAGGGCCGCCTACCAGCACGAGTCCTTTTA |
| | CTGGGAACTCGCCATCACCACACCTCGGCACGGCGATAGACCTTTCGAGATCGGCCACATCG |
| | ACCACACCGAGCTGGATGTGGAACTCGTGTGTAGCGACACCGGCAGAAACCTGGGTAGACCT |
| | TGGGCCACCTTTCTGGTGGACGCCTACTCTAGAAGGCTGCTGGCCGTGTACCTGACCTTCGAC |
| | AGCCCAAGCTACCGGTCCTGTCTCATGGTGCTGCGGATCTGCGTGAAGAGGCATGGCAGACT |
| | GCCTCAGATCGTGGTGGTCGATAATGGCGCCGAGTTTCACAGCGTGTACTTCGAAACCCTGCT |
| | GGCTACCTTCGAGTGCACCAAGAAGCAGCGGCCTCCAGCCAAGGCCAGATTTGGCAGCGTGT |
| | GCGAGAGACTGTTCGGCACCAGCAACACCCAGTTCGTGCACAACCTGCTGGGCAATACCCAG |
| | ATCACCCGGAACGTGCGGCAAGTGACCAAGAGCGTGAACCCCAAGAACCTGGCTGTGTGGAC |
| | ACTGGGACTGCTGTACGAGTACCTGTGTGCCTGGGCCTACGAAGTGTACGATACCGACGAAC |
| | ACCCCGCTCTGTTTCAGAGCCCTAGGGATGCCTTTGCCGCCGGAATGGCTATCGGCGGATCTC |
| | GGGTGCACAGAATGATCCCTTACGACGAGAACTTCCAGATCCTGACACTGCCCACCACCTCC |
| | GAGGGCAAAGCCAAGGTGCAAGTCGGCAGAGGCATCAAGATCAACTACATCTACTACTGGTC |
| | CAACAGCTTCAGGGACCCACAGATCGAGAACACCAGCGTGCAGATCAGATACGACCCCTTCA |
| | ACATCGGAATCGCCTACGCCTTCGTCAGAGGCCAGTGGGTGCAGTGCATCAGCCAGTACTAC |
| | GCCGAACTCCAGGGCAGAAGCGAGAAAGAGCTGAAACTGGCCAGCATCGAGCTGCGGAAGC |
| | ACTACAGCAATCACACCCAGCAGAGCAAGGTGTCCGCCAAAAACCTGGCCGAGTTCCTGGCA |
| | AGCGTGGAAGCTCAAGAAGCCCTGCTGGAACAGAGAAGCTACGACGCCGAAGTGAAAGAGG |
| | TGTTCCGGGTCATCGAAGGCGGCAAGGCCACAACCAGCAGAAATGAGGAACCCAAGCTGATC |
| | CAAGTGACCTTCGCCAACACCGACTTCCAGGCCGATGAGGACGAAGCCATCGTGCCTGAAAC |
| | ACTGGTGGTGTACGAGGAATTCGGAGGATCTGGCGGAGGCGGCTCTGGCGGCGGTGGAAGCG |
| | GAGGACCTAAGAAGAAGAGAAAAGTCTACCCCTACGACGTGCCAGACTACGCCTGACTAGCA |
| | TAACCCCTTGGGGCGCACTCCTCAGGTGCAGGCTGCCTATCAGAAGGTGGTGGCTGGTGTGG |
| | CCAATGCCCTGGCTCACAAATACCACTGAGATCTTTTTCCCTCTGCCAAAAATTATGGGGACA |
| | TCATGAAGCCCCTTGAGCATCTGACTTCTGGCTAATAAAGGAAATTTATTTTCATTGCAATAG |
| | TGTGTTGGAATTTTTTGTGTCTCTCACTCGGAAGGACATATGGGAGGGCAAATCATTTAAAAC |
| | ATCAGAATGAGTATTTGGTTTAGAGTTTGGCAACATATGCCCATATGCTGGCTGCCATGAACA |
| | AAGGTTGGCTATAAAGAGGTCATCAGTATATGAAACAGCCCCCTGCTGTCCATTCCTTATTCC |
| | ATAGAAAAGCCTTGACTTGAGGTTAGATTTTTTTTATATTTTGTTTTGTGTTATTTTTTTCTTTA |
| | ACATCCCTAAAATTTTCCTTACATGTTTTACTAGCCAGATTTTTCCTCCTCTCCTGACTACTCCC |
| | AGTCATAGCTGTCCCTCTTCTCTTATGGAGATCCCTCGACCTGCAGCCCAAGCTTGGCGTAAT |
| | CATGGTCATAGCTGTTTCCTGTGTGAAATTGTTATCCGCTCACAATTCCACACAACATACGAG |
| | CCGGAAGCATAAAGTGTAAAGCCTGGGGTGCCTAATGAGTGAGCTAACTCACATTAATTGCG |
| | TTGCGCTCACTGCCCGCTTTCCAGTCGGGAAACCTGTCGTGCCAGCGGATCCGCATCTCAATT |
| | AGTCAGCAACCATAGTCCCGCCCCTAACTCCGCCCATCCCGCCCCTAACTCCGCCCAGTTCCG |
| | CCCATTCTCCGCCCCATGGCTGACTAATTTTTTTTATTTATGCAGAGGCCGAGGCCGCCTCGGC |
| | CTCTGAGCTATTCCAGAAGTAGTGAGGAGGCTTTTTTGGAGGCCTAGGCTTTTGCAAAAAGCT |
| | AACTTGTTTATTGCAGCTTATAATGGTTACAAATAAAGCAATAGCATCACAAATTTCACAAAT |
| | AAAGCATTTTTTTCACTGCATTCTAGTTGTGGTTTGTCCAAACTCATCAATGTATCTTATCATG |
| | TCTGGATCCGCTGCATTAATGAATCGGCCAACGCGCGGGGAGAGGCGGTTTGCGTATTGGGC |
| | GCTCTTCCGCTTCCTCGCTCACTGACTCGCTGCGCTCGGTCGTTCGGCTGCGGCGAGCGGTAT |
| | CAGCTCACTCAAAGGCGGTAATACGGTTATCCACAGAATCAGGGGATAACGCAGGAAAGAA |
| | CATGTGAGCAAAAGGCCAGCAAAAGGCCAGGAACCGTAAAAAGGCCGCGTTGCTGGCGTTTT |
| | TCCATAGGCTCCGCCCCCCTGACGAGCATCACAAAAATCGACGCTCAAGTCAGAGGTGGCGA |
| | AACCCGACAGGACTATAAAGATACCAGGCGTTTCCCCCTGGAAGCTCCCTCGTGCGCTCTCCT |
| | GTTCCGACCCTGCCGCTTACCGGATACCTGTCCGCCTTTCTCCCTTCGGGAAGCGTGGCGCTTT |
| | CTCATAGCTCACGCTGTAGGTATCTCAGTTCGGTGTAGGTCGTTCGCTCCAAGCTGGGCTGTG |
| | TGCACGAACCCCCCGTTCAGCCCGACCGCTGCGCCTTATCCGGTAACTATCGTCTTGAGTCCA |
| | ACCCGGTAAGACACGACTTATCGCCACTGGCAGCAGCCACTGGTAACAGGATTAGCAGAGCG |
| | AGGTATGTAGGCGGTGCTACAGAGTTCTTGAAGTGGTGGCCTAACTACGGCTACACTAGAAG |
| | AACAGTATTTGGTATCTGCGCTCTGCTGAAGCCAGTTACCTTCGGAAAAAGAGTTGGTAGCTC |
| | TTGATCCGGCAAACAAACCACCGCTGGTAGCGGTGGTTTTTTTGTTTGCAAGCAGCAGATTAC |
| | GCGCAGAAAAAAAGGATCTCAAGAAGATCCTTTGATCTTTTCTACGGGGTCTGACGCTCAGT |
| | GGAACGAAAACTCACGTTAAGGGATTTTGGTCATGAGATTATCAAAAAGGATCTTCACCTAG |
| | ATCCTTTTAAATTAAAAATGAAGTTTTAAATCAATCTAAAGTATATATGAGTAAACTTGGTCT |
| | GACAGTTACCAATGCTTAATCAGTGAGGCACCTATCTCAGCGATCTGTCTATTTCGTTCATCC |
| | ATAGTTGCCTGACTCCCCGTCGTGTAGATAACTACGATACGGGAGGGCTTACCATCTGGCCCC |
| | AGTGCTGCAATGATACCGCGAGACCCACGCTCACCGGCTCCAGATTTATCAGCAATAAACCA |
| | GCCAGCCGGAAGGGCCGAGCGCAGAAGTGGTCCTGCAACTTTATCCGCCTCCATCCAGTCTA |
| | TTAATTGTTGCCGGGAAGCTAGAGTAAGTAGTTCGCCAGTTAATAGTTTGCGCAACGTTGTTG |
| | CCATTGCTACAGGCATCGTGGTGTCACGCTCGTCGTTTGGTATGGCTTCATTCAGCTCCGGTTC |
| | CCAACGATCAAGGCGAGTTACATGATCCCCCATGTTGTGCAAAAAAGCGGTTAGCTCCTTCG |
| | GTCCTCCGATCGTTGTCAGAAGTAAGTTGGCCGCAGTGTTATCACTCATGGTTATGGCAGCAC |
| | TGCATAATTCTCTTACTGTCATGCCATCCGTAAGATGCTTTTCTGTGACTGGTGAGTACTCAAC |
| | CAAGTCATTCTGAGAATAGTGTATGCGGCGACCGAGTTGCTCTTGCCCGGCGTCAATACGGG |
| | ATAATACCGCGCCACATAGCAGAACTTTAAAAGTGCTCATCATTGGAAAACGTTCTTCGGGG |
| | CGAAAACTCTCAAGGATCTTACCGCTGTTGAGATCCAGTTCGATGTAACCCACTCGTGCACCC |
| | AACTGATCTTCAGCATCTTTTACTTTCACCAGCGTTTCTGGGTGAGCAAAAACAGGAAGGCAA |
| | AATGCCGCAAAAAAGGGAATAAGGGCGACACGGAAATGTTGAATACTCATACTCTTCCTTTT |
| | TCAATATTATTGAAGCATTTATCAGGGTTATTGTCTCATGAGCGGATACATATTTGAATGTATT |
| | TAGAAAAATAAACAAATAGGGGTTCCGCGCACATTTCCCCGAAAAGTGCCACCTGGGTCGAC |
| | ATTGATTATTGACTAGTAATAGTAATCAATTACGGGGTCATTAGTTCATAGCCCATATATGGA |
| | GTTCCG (SEQ ID NO: 375) |
| IB20_pCM | CGTTACATAACTTACGGTAAATGGCCCGCCTGGCTGACCGCCCAACGACCCCCGCCCATTGAC |
| V-TnsC- | GTCAATAATGACGTATGTTCCCATAGTAACGCCAATAGGGACTTTCCATTGACGTCAATGGGT |
| NLS-HA | GGAGTATTTACGGTAAACTGCCCACTTGGCAGTACATCAAGTGTATCATATGCCAAGTACGCC |
| | CCCTATTGACGTCAATGACGGTAAATGGCCCGCCTGGCATTATGCCCAGTACATGACCTTATG |
| | GGACTTTCCTACTTGGCAGTACATCTACGTATTAGTCATCGCTATTACCATGGTGATGCGGTTT |
| | TGGCAGTACATCAATGGGCGTGGATAGCGGTTTGACTCACGGGGATTTCCAAGTCTCCACCCC |
| | ATTGACGTCAATGGGAGTTTGTTTTGGCACCAAAATCAACGGGACTTTCCAAAATGTCGTAAC |
| | AACTCCGCCCCATTGACGCAAATGGGCGGTAGGCGTGTACGGTGGGAGGTCTATATAAGCAG |
| | AGCTGGTTTAGTGAACCGTCAGATCCGCTAGCGCTACCGGACTCAGATCGCCACCATGACCA |
| | AGAGCACCGGCTTTCCACTGGAACTGCTGACCAGACCTGCCACCGAGAGACTGGCCTACTTC |
| | GAGAACTACACCGTGGCTCACCCCAGACTGAAAGAGGTGTACGAGATCCTGATGCGGACAAT |
| | CGCCGAACCTGCCGGCGCTAGCTTCATCTTTGTGTATGGCGCTAGCGGCGTGGGCAAGACCAC |
| | ACTGAGACTGAGAGTGGAACAGAAGCTGACCGAGCTGGCCCTGCCTAAGCTGGAAAGCGAT |
| | AGAGCCAGAGTGCCCGTCGTGGGCATTGAGGCTATTGCCCCTGAGAGCCGGTACTTCAACTG |
| | GAAAGAGTACTACACACGGGCCCTGATCACCCTGGAAGAACCCCTGATCGACCACAAGTTCG |
| | ACTATGGCGTGCGGGGCATCAGCAGAGACAACTTCGGCAAGATCAACGTGGAAAGCAAGGT |
| | GGTGGCCCCTGCTCTGAGAAGGGCCCTCGAAAATGCCCTGATCCACAGACACCCCGACGTGT |
| | TCTTTGTGGACGAGGCCCAGCACTTTGGCAAGGTGGCCTCTGGCTACAAGCTGCAGGATCAG |
| | CTGGACTGCCTGAAGTCCCTGGCCAACATGACAGGCATCCTGCACTGTCTGCTGGGCACCTAC |
| | GAGCTGCTGACCTTCAGAAATCTGAGCGGCCAGCTGTCTCGGCGGAGCGTGGACATCCACTT |
| | CAGAAGATACTGCGCCGACTCTCCCGAGGACGTGCAGGCCTTTAAAAGCGTGCTGCTGACAT |
| | TCCAGCAGCATCTGCCTCTGGCCGAGACACCCAATCTGGTGGATCACTGGGAGTACTTCTACG |
| | AGAGAACCCTGGGCTGCATCGGCACCCTGAAGGACTGGCTGAAGAGAGTGCTGAGCGACGCC |
| | CTGGATAGAGAGGCCACAACCATCACACTGAAGGACCTGCAGAAAAGGGCCCTGAGCGTGG |
| | CCCAGTGCCAGAAGATGTTCAAAGAGATCCAAGAGGGCGAACGCCAGCTGAGCGAAACAGA |
| | GGCCGATGTGCAGAACCTGAGATCTGCCCTTGGCCTGGGAGCCAAGCCTATCGTTCTGCCTGA |
| | GGAAACCCCTAAGACCACCAGACCTCCAGGCAAAGTGGGCAAAAGAAAGCCCAAGAGGGAC |
| | CCCATCGGAGTGCAGCAGGATGTGTCTGGAGGATCTGGCGGAGGCGGCTCTGGCGGCGGTGG |
| | AAGCGGAGGACCTAAGAAGAAGAGAAAAGTCTACCCCTACGACGTGCCAGACTACGCCTGA |
| | CTAGCATAACCCCTTGGGGCGCACTCCTCAGGTGCAGGCTGCCTATCAGAAGGTGGTGGCTG |
| | GTGTGGCCAATGCCCTGGCTCACAAATACCACTGAGATCTTTTTCCCTCTGCCAAAAATTATG |
| | GGGACATCATGAAGCCCCTTGAGCATCTGACTTCTGGCTAATAAAGGAAATTTATTTTCATTG |
| | CAATAGTGTGTTGGAATTTTTTGTGTCTCTCACTCGGAAGGACATATGGGAGGGCAAATCATT |
| | TAAAACATCAGAATGAGTATTTGGTTTAGAGTTTGGCAACATATGCCCATATGCTGGCTGCCA |
| | TGAACAAAGGTTGGCTATAAAGAGGTCATCAGTATATGAAACAGCCCCCTGCTGTCCATTCCT |
| | TATTCCATAGAAAAGCCTTGACTTGAGGTTAGATTTTTTTTATATTTTGTTTTGTGTTATTTTTT |
| | TCTTTAACATCCCTAAAATTTTCCTTACATGTTTTACTAGCCAGATTTTTCCTCCTCTCCTGACT |
| | ACTCCCAGTCATAGCTGTCCCTCTTCTCTTATGGAGATCCCTCGACCTGCAGCCCAAGCTTGG |
| | CGTAATCATGGTCATAGCTGTTTCCTGTGTGAAATTGTTATCCGCTCACAATTCCACACAACA |
| | TACGAGCCGGAAGCATAAAGTGTAAAGCCTGGGGTGCCTAATGAGTGAGCTAACTCACATTA |
| | ATTGCGTTGCGCTCACTGCCCGCTTTCCAGTCGGGAAACCTGTCGTGCCAGCGGATCCGCATC |
| | TCAATTAGTCAGCAACCATAGTCCCGCCCCTAACTCCGCCCATCCCGCCCCTAACTCCGCCCA |
| | GTTCCGCCCATTCTCCGCCCCATGGCTGACTAATTTTTTTTATTTATGCAGAGGCCGAGGCCGC |
| | CTCGGCCTCTGAGCTATTCCAGAAGTAGTGAGGAGGCTTTTTTGGAGGCCTAGGCTTTTGCAA |
| | AAAGCTAACTTGTTTATTGCAGCTTATAATGGTTACAAATAAAGCAATAGCATCACAAATTTC |
| | ACAAATAAAGCATTTTTTTCACTGCATTCTAGTTGTGGTTTGTCCAAACTCATCAATGTATCTT |
| | ATCATGTCTGGATCCGCTGCATTAATGAATCGGCCAACGCGCGGGGAGAGGCGGTTTGCGTA |
| | TTGGGCGCTCTTCCGCTTCCTCGCTCACTGACTCGCTGCGCTCGGTCGTTCGGCTGCGGCGAG |
| | CGGTATCAGCTCACTCAAAGGCGGTAATACGGTTATCCACAGAATCAGGGGATAACGCAGGA |
| | AAGAACATGTGAGCAAAAGGCCAGCAAAAGGCCAGGAACCGTAAAAAGGCCGCGTTGCTGG |
| | CGTTTTTCCATAGGCTCCGCCCCCCTGACGAGCATCACAAAAATCGACGCTCAAGTCAGAGGT |
| | GGCGAAACCCGACAGGACTATAAAGATACCAGGCGTTTCCCCCTGGAAGCTCCCTCGTGCGC |
| | TCTCCTGTTCCGACCCTGCCGCTTACCGGATACCTGTCCGCCTTTCTCCCTTCGGGAAGCGTGG |
| | CGCTTTCTCATAGCTCACGCTGTAGGTATCTCAGTTCGGTGTAGGTCGTTCGCTCCAAGCTGG |
| | GCTGTGTGCACGAACCCCCCGTTCAGCCCGACCGCTGCGCCTTATCCGGTAACTATCGTCTTG |
| | AGTCCAACCCGGTAAGACACGACTTATCGCCACTGGCAGCAGCCACTGGTAACAGGATTAGC |
| | AGAGCGAGGTATGTAGGCGGTGCTACAGAGTTCTTGAAGTGGTGGCCTAACTACGGCTACAC |
| | TAGAAGAACAGTATTTGGTATCTGCGCTCTGCTGAAGCCAGTTACCTTCGGAAAAAGAGTTG |
| | GTAGCTCTTGATCCGGCAAACAAACCACCGCTGGTAGCGGTGGTTTTTTTGTTTGCAAGCAGC |
| | AGATTACGCGCAGAAAAAAAGGATCTCAAGAAGATCCTTTGATCTTTTCTACGGGGTCTGAC |
| | GCTCAGTGGAACGAAAACTCACGTTAAGGGATTTTGGTCATGAGATTATCAAAAAGGATCTT |
| | CACCTAGATCCTTTTAAATTAAAAATGAAGTTTTAAATCAATCTAAAGTATATATGAGTAAAC |
| | TTGGTCTGACAGTTACCAATGCTTAATCAGTGAGGCACCTATCTCAGCGATCTGTCTATTTCGT |
| | TCATCCATAGTTGCCTGACTCCCCGTCGTGTAGATAACTACGATACGGGAGGGCTTACCATCT |
| | GGCCCCAGTGCTGCAATGATACCGCGAGACCCACGCTCACCGGCTCCAGATTTATCAGCAAT |
| | AAACCAGCCAGCCGGAAGGGCCGAGCGCAGAAGTGGTCCTGCAACTTTATCCGCCTCCATCC |
| | AGTCTATTAATTGTTGCCGGGAAGCTAGAGTAAGTAGTTCGCCAGTTAATAGTTTGCGCAACG |
| | TTGTTGCCATTGCTACAGGCATCGTGGTGTCACGCTCGTCGTTTGGTATGGCTTCATTCAGCTC |
| | CGGTTCCCAACGATCAAGGCGAGTTACATGATCCCCCATGTTGTGCAAAAAAGCGGTTAGCT |
| | CCTTCGGTCCTCCGATCGTTGTCAGAAGTAAGTTGGCCGCAGTGTTATCACTCATGGTTATGG |
| | CAGCACTGCATAATTCTCTTACTGTCATGCCATCCGTAAGATGCTTTTCTGTGACTGGTGAGTA |
| | CTCAACCAAGTCATTCTGAGAATAGTGTATGCGGCGACCGAGTTGCTCTTGCCCGGCGTCAAT |
| | ACGGGATAATACCGCGCCACATAGCAGAACTTTAAAAGTGCTCATCATTGGAAAACGTTCTT |
| | CGGGGCGAAAACTCTCAAGGATCTTACCGCTGTTGAGATCCAGTTCGATGTAACCCACTCGTG |
| | CACCCAACTGATCTTCAGCATCTTTTACTTTCACCAGCGTTTCTGGGTGAGCAAAAACAGGAA |
| | GGCAAAATGCCGCAAAAAAGGGAATAAGGGCGACACGGAAATGTTGAATACTCATACTCTTC |
| | CTTTTTCAATATTATTGAAGCATTTATCAGGGTTATTGTCTCATGAGCGGATACATATTTGAAT |
| | GTATTTAGAAAAATAAACAAATAGGGGTTCCGCGCACATTTCCCCGAAAAGTGCCACCTGGG |
| | TCGACATTGATTATTGACTAGTAATAGTAATCAATTACGGGGTCATTAGTTCATAGCCCATAT |
| | ATGGAGTTCCG (SEQ ID NO: 376) |
| pDonor_IB | TCGCGCGTTTCGGTGATGACGGTGAAAACCTCTGACACATGCAGCTCCCGGAGACGGTCACA |
| 20-EFS- | GCTTGTCTGTAAGCGGATGCCGGGAGCAGACAAGCCCGTCAGGGCGCGTCAGCGGGTGTTGG |
| puro- | CGGGTGTCGGGGCTGGCTTAACTATGCGGCATCAGAGCAGATTGTACTGAGAGTGCACCATA |
| pA_SV40ori | TGCGGTGTGAAATACCGCACAGATGCGTAAGGAGAAAATACCGCATCAGGCGCCATTCGCCA |
| | TTCAGGCTGCGCAACTGTTGGGAAGGGCGATCGGTGCGGGCCTCTTCGCTATTACGCCAGCTG |
| | GCGAAAGGGGGATGTGCTGCAAGGCGATTAAGTTGGGTAACGCCAGGGTTTTCCCAGTCACG |
| | ACGTTGTAAAACGACGGCCAGTGAATTGACGCGTATTGGGATCAATGGCTGGTACTATAATT |
| | CCCCTGGTTGCTGAAGCGGTAAAAGTGCGTCAACTAGTTTTGTGACTTTACCCATAACTTTGC |
| | CGTTACTGGAACCATAACTTTGCCGTCAACAACACTACAACCCTCATTCTTGCGTCAGCTAAT |
| | TTTGGATGAAATTGACAGTTTGGAACCATAACTTTGCCGCTAGTCCAAATTGGAAGGATAAGC |
| | TTGCCGTGAGTCCAATCAAGCATAGAAAGCAGGAAAACGCCGAATTTTTTTAGAATGGAGCA |
| | GAAGCCGGGGATCCtaggtcttgaaaggagtgggaattggctccggtgcccgtcagtgggcagagcgcacategcccacagtccccgaga |
| | agttggggggaggggtcggcaattgatccggtgcctagagaaggtggcgcggggtaaactgggaaagtgatgtcgtgtactggctccgcctttttcccga |
| | gggtgggggagaaccgtatataagtgcagtagtcgccgtgaacgttctttttcgcaacgggtttgccgccagaacacaggaccggttctagagcgctgcc |
| | accatgaccgagtacaagcccacggtgcgcctcgccacccgcgacgacgtccccagggccgtacgcaccctcgccgccgcgttcgccgactaccccg |
| | ccacgcgccacaccgtcgatccggaccgccacatcgagcgggtcaccgagctgcaagaactcttcctcacgcgcgtcgggctcgacatcggcaaggtg |
| | tgggtcgcggacgacggcgccgcggtggcggtctggaccacgccggagagcgtcgaagcgggggcggtgttcgccgagatcggccegcgcatggc |
| | cgagttgagcggttcccggctggccgcgcagcaacagatggaaggcctcctggcgccgcaccggcccaaggagcccgcgtggttcctggccaccgtc |
| | ggcgtctcgcccgaccaccagggcaagggtctgggcagcgccgtcgtgctccccggagtggaggcggccgagcgcgccggggtgcccgccttcctg |
| | gagacctccgcgccccgcaacctccccttctacgageggctcggcttcaccgtcaccgccgacgtcgaggtgcccgaaggaccgcgcacctggtgcat |
| | gacccgcaagcccggtgcctgaTTCTAaataaaggaaatttattttcattgcaatagtgtgttggaattttttgtgtctctcaGAGTCCACGACG |
| | TGAGTTTGGTTTGTAAGCTGTTATATGTAAAACTAGAACAGCTTATATAACTGGAACCATAAC |
| | CTTGCCACCCTTTATTGGAAGCATAAGCTTGCCGTTGCGGCAAAGTTATGGGTAAAGTCACAT |
| | CTAAGCTGTCTCTAGCCTTTATTTACTGAATGGGCAGTACCAGACTCGAACTGATGACAATCC |
| | CAATGGCGCGCCGAGCTTGGCGTAATCATGGTCATAGCTGTTTCCTGTGTGAAATTGTTATCC |
| | GCTCACAATTCCACACAACATACGAGCCGGAAGCATAAAGTGTAAAGCCTGGGGTGCCTAAT |
| | GAGTGAGCTAACTCACATTAATTGCGTTGCGCTCACTGCCCGCTTTCCAGTCGGGAAACCTGT |
| | CGTGCCAGCTGCATTAATGAATCGGCCAACGCGCGGGGAGAGGCGGTTTGCGTATTGGGCGC |
| | TCTTCCGCTTCCTCGCTCACTGACTCGCTGCGCTCGGTCGTTCGGCTGCGGCGAGCGGTATCA |
| | GCTCACTCAAAGGCGGTAATACGGTTATCCACAGAATCAGGGGATAACGCAGGAAAGAACAT |
| | GTGAGCAAAAGGCCAGCAAAAGGCCAGTAAGATACATTGATGAGTTTGGACAAACCACAAC |
| | TAGAATGCAGTGAAAAAAATGCTTTATTTGTGAAATTTGTGATGCTATTGCTTTATTTGTAAC |
| | CATTATAAGCTGCAATAAACAAGTTAGCTTTTTGCAAAAGCCTAGGCCTCCAAAAAAGCCTCC |
| | TCACTACTTCTGGAATAGCTCAGAGGCAGAGGCGGCCTCGGCCTCTGCATAAATAAAAAAAA |
| | TTAGTCAGCCATGGGGCGGAGAATGGGCGGAACTGGGCGGAGTTAGGGGCGGGATGGGCGG |
| | AGTTAGGGGCGGGACTATGGTTGCTGACTAATTGAGATGCATGCTTTGCATACTTCTGCCTGC |
| | TGGGGAGCCTGGGGACTTTCCACACCTGGTTGCTGACTAATTGAGATGCATGCTTTGCATACT |
| | TCTGCCTGCTGGGGAGCCTGGGGACTTTCCACACCCTAACTGACACACGAACCGTAAAAAGG |
| | CCGCGTTGCTGGCGTTTTTCCATAGGCTCCGCCCCCCTGACGAGCATCACAAAATCACAAAAA |
| | TCGACGCTCAAGTCAGAGGTGGCGAAACCCGACAGGACTATAAAGATACCAGGCGTTTCCCC |
| | CTGGAAGCTCCCTCGTGCGCTCTCCTGTTCCGACCCTGCCGCTTACCGGATACCTGTCCGCCTT |
| | TCTCCCTTCGGGAAGCGTGGCGCTTTCTCATAGCTCACGCTGTAGGTATCTCAGTTCGGTGTA |
| | GGTCGTTCGCTCCAAGCTGGGCTGTGTGCACGAACCCCCCGTTCAGCCCGACCGCTGCGCCTT |
| | ATCCGGTAACTATCGTCTTGAGTCCAACCCGGTAAGACACGACTTATCGCCACTGGCAGCAGC |
| | CACTGGTAACAGGATTAGCAGAGCGAGGTATGTAGGCGGTGCTACAGAGTTCTTGAAGTGGT |
| | GGCCTAACTACGGCTACACTAGAAGAACAGTATTTGGTATCTGCGCTCTGCTGAAGCCAGTTA |
| | CCTTCGGAAAAAGAGTTGGTAGCTCTTGATCCGGCAAACAAACCACCGCTGGTAGCGGTGGT |
| | TTTTTTGTTTGCAAGCAGCAGATTACGCGCAGAAAAAAAGGATCTCAAGAAGATCCTTTGATC |
| | TTTTCTACGGGGTCTGACGCTCAGTGGAACGAAAACTCACGTTAAGGGATTTTGGTCATGAGA |
| | TTATCAAAAAGGATCTTCACCTAGATCCTTTTAAATTAAAAATGAAGTTTTAAATCAATCTAA |
| | AGTATATATGAGTAAACTTGGTCTGACAGTTACCAATGCTTAATCAGTGAGGCACCTATCTCA |
| | GCGATCTGTCTATTTCGTTCATCCATAGTTGCCTGACTCCCCGTCGTGTAGATAACTACGATAC |
| | GGGAGGGCTTACCATCTGGCCCCAGTGCTGCAATGATACCGCGAGACCCACGCTCACCGGCT |
| | CCAGATTTATCAGCAATAAACCAGCCAGCCGGAAGGGCCGAGCGCAGAAGTGGTCCTGCAAC |
| | TTTATCCGCCTCCATCCAGTCTATTAATTGTTGCCGGGAAGCTAGAGTAAGTAGTTCGCCAGT |
| | TAATAGTTTGCGCAACGTTGTTGCCATTGCTACAGGCATCGTGGTGTCACGCTCGTCGTTTGG |
| | TATGGCTTCATTCAGCTCCGGTTCCCAACGATCAAGGCGAGTTACATGATCCCCCATGTTGTG |
| | CAAAAAAGCGGTTAGCTCCTTCGGTCCTCCGATCGTTGTCAGAAGTAAGTTGGCCGCAGTGTT |
| | ATCACTCATGGTTATGGCAGCACTGCATAATTCTCTTACTGTCATGCCATCCGTAAGATGCTTT |
| | TCTGTGACTGGTGAGTACTCAACCAAGTCATTCTGAGAATAGTGTATGCGGCGACCGAGTTGC |
| | TCTTGCCCGGCGTCAATACGGGATAATACCGCGCCACATAGCAGAACTTTAAAAGTGCTCATC |
| | ATTGGAAAACGTTCTTCGGGGCGAAAACTCTCAAGGATCTTACCGCTGTTGAGATCCAGTTCG |
| | ATGTAACCCACTCGTGCACCCAACTGATCTTCAGCATCTTTTACTTTCACCAGCGTTTCTGGGT |
| | GAGCAAAAACAGGAAGGCAAAATGCCGCAAAAAAGGGAATAAGGGCGACACGGAAATGTT |
| | GAATACTCATACTCTTCCTTTTTCAATATTATTGAAGCATTTATCAGGGTTATTGTCTCATGAG |
| | CGGATACATATTTGAATGTATTTAGAAAAATAAACAAATAGGGGTTCCGCGCACATTTCCCCG |
| | AAAAGTGCCACCTGACGTCTAAGAAACCATTATTATCATGACATTAACCTATAAAAATAGGC |
| | GTATCACGAGGCCCTTTCGTC (SEQ ID NO: 377) |
| pU6- | AATTCTGTGGAATGTGTGTCAGTTAGGGTGTGGAAAGTCCCCAGGCTCCCCAGCAGGCAGAA |
| IB20_CRISPR | GTATGCAAAGCATGCATCTCAATTAGTCAGCAACCAGGTGTGGAAAGTCCCCAGGCTCCCCA |
| (DR- | GCAGGCAGAAGTATGCAAAGCATGCATCTCAATTAGTCAGCAACCATAGTCCCGCCCCTAAC |
| spacer- | TCCGCCCATCCCGCCCCTAACTCCGCCCAGTTCCGCCCATTCTCCGCCCCATGGCTGACTAATT |
| DR | TTTTTTATTTATGCAGAGGCCGAGGCCGCCTCTGCCTCTGAGCTATTCCAGAAGTAGTGAGGA |
| backbone) | GGCTTTTTTGGAGGCCTAGGCTTTTGCAAAAAGCTAACTTGTTTATTGCAGCTTATAATGGTTA |
| | CAAATAAAGCAATAGCATCACAAATTTCACAAATAAAGCATTTTTTTCACTGCATTCTAGTTG |
| | TGGTTTGTCCAAACTCATCAATGTATCTTATCATGTCTGTATACCGTCGACCTCTAGCTAGAGC |
| | TTGGCGTAATCATGGTCATAGCTGTTTCCTGTGTGAAATTGTTATCCGCTCACAATTCCACACA |
| | ACATACGAGCCGGAAGCATAAAGTGTAAAGCCTGGGGTGCCTAATGAGTGAGCTAACTCACA |
| | TTAATTGCGTTGCGCTCACTGCCCGCTTTCCAGTCGGGAAACCTGTCGTGCCAGCTGCATTAA |
| | TGAATCGGCCAACGCGCGGGGAGAGGCGGTTTGCGTATTGGGCGCTCTTCCGCTTCCTCGCTC |
| | ACTGACTCGCTGCGCTCGGTCGTTCGGCTGCGGCGAGCGGTATCAGCTCACTCAAAGGCGGT |
| | AATACGGTTATCCACAGAATCAGGGGATAACGCAGGAAAGAACATGTGAGCAAAAGGCCAG |
| | CAAAAGGCCAGGAACCGTAAAAAGGCCGCGTTGCTGGCGTTTTTCCATAGGCTCCGCCCCCC |
| | TGACGAGCATCACAAAAATCGACGCTCAAGTCAGAGGTGGCGAAACCCGACAGGACTATAA |
| | AGATACCAGGCGTTTCCCCCTGGAAGCTCCCTCGTGCGCTCTCCTGTTCCGACCCTGCCGCTT |
| | ACCGGATACCTGTCCGCCTTTCTCCCTTCGGGAAGCGTGGCGCTTTCTCATAGCTCACGCTGT |
| | AGGTATCTCAGTTCGGTGTAGGTCGTTCGCTCCAAGCTGGGCTGTGTGCACGAACCCCCCGTT |
| | CAGCCCGACCGCTGCGCCTTATCCGGTAACTATCGTCTTGAGTCCAACCCGGTAAGACACGAC |
| | TTATCGCCACTGGCAGCAGCCACTGGTAACAGGATTAGCAGAGCGAGGTATGTAGGCGGTGC |
| | TACAGAGTTCTTGAAGTGGTGGCCTAACTACGGCTACACTAGAAGAACAGTATTTGGTATCTG |
| | CGCTCTGCTGAAGCCAGTTACCTTCGGAAAAAGAGTTGGTAGCTCTTGATCCGGCAAACAAA |
| | CCACCGCTGGTAGCGGTTTTTTTGTTTGCAAGCAGCAGATTACGCGCAGAAAAAAAGGATCTC |
| | AAGAAGATCCTTTGATCTTTTCTACGGGGTCTGACGCTCAGTGGAACGAAAACTCACGTTAAG |
| | GGATTTTGGTCATGAGATTATCAAAAAGGATCTTCACCTAGATCCTTTTAAATTAAAAATGAA |
| | GTTTTAAATCAATCTAAAGTATATATGAGTAAACTTGGTCTGACAGTTACCAATGCTTAATCA |
| | GTGAGGCACCTATCTCAGCGATCTGTCTATTTCGTTCATCCATAGTTGCCTGACTCCCCGTCGT |
| | GTAGATAACTACGATACGGGAGGGCTTACCATCTGGCCCCAGTGCTGCAATGATACCGCGAG |
| | ACCCACGCTCACCGGCTCCAGATTTATCAGCAATAAACCAGCCAGCCGGAAGGGCCGAGCGC |
| | AGAAGTGGTCCTGCAACTTTATCCGCCTCCATCCAGTCTATTAATTGTTGCCGGGAAGCTAGA |
| | GTAAGTAGTTCGCCAGTTAATAGTTTGCGCAACGTTGTTGCCATTGCTACAGGCATCGTGGTG |
| | TCACGCTCGTCGTTTGGTATGGCTTCATTCAGCTCCGGTTCCCAACGATCAAGGCGAGTTACA |
| | TGATCCCCCATGTTGTGCAAAAAAGCGGTTAGCTCCTTCGGTCCTCCGATCGTTGTCAGAAGT |
| | AAGTTGGCCGCAGTGTTATCACTCATGGTTATGGCAGCACTGCATAATTCTCTTACTGTCATG |
| | CCATCCGTAAGATGCTTTTCTGTGACTGGTGAGTACTCAACCAAGTCATTCTGAGAATAGTGT |
| | ATGCGGCGACCGAGTTGCTCTTGCCCGGCGTCAATACGGGATAATACCGCGCCACATAGCAG |
| | AACTTTAAAAGTGCTCATCATTGGAAAACGTTCTTCGGGGCGAAAACTCTCAAGGATCTTACC |
| | GCTGTTGAGATCCAGTTCGATGTAACCCACTCGTGCACCCAACTGATCTTCAGCATCTTTTACT |
| | TTCACCAGCGTTTCTGGGTGAGCAAAAACAGGAAGGCAAAATGCCGCAAAAAAGGGAATAA |
| | GGGCGACACGGAAATGTTGAATACTCATACTCTTCCTTTTTCAATATTATTGAAGCATTTATC |
| | AGGGTTATTGTCTCATGAGCGGATACATATTTGAATGTATTTAGAAAAATAAACAAATAGGG |
| | GTTCCGCGCACATTTCCCCGAAAAGTGCCACCTgagggcctatttcccatgattccttcatatttgcatatacgatacaaggct |
| | gttagagagataattagaattaatttgactgtaaacacaaagatattagtacaaaatacgtgacgtagaaagtaataatttcttgggtagtttgcagttttaaaatt |
| | atgttttaaaatggactatcatatgcttaccgtaacttgaaagtatttcgatttcttggctttatatatcttgtggaaaggacGTGAGTCGTGGCTTTA |
| | TGCCGTTAGGCGTTGCTCAAAgtcttcTCTgaagacAGTGAGTCGTGGCTTTATGCCGTTAGGCGTTG |
| | CTCAATTTTTT (SEQ ID NO: 378) |
| pU6- | AATTCTGTGGAATGTGTGTCAGTTAGGGTGTGGAAAGTCCCCAGGCTCCCCAGCAGGCAGAA |
| IB20_CRISPR_ | GTATGCAAAGCATGCATCTCAATTAGTCAGCAACCAGGTGTGGAAAGTCCCCAGGCTCCCCA |
| ID3 | GCAGGCAGAAGTATGCAAAGCATGCATCTCAATTAGTCAGCAACCATAGTCCCGCCCCTAAC |
| | TCCGCCCATCCCGCCCCTAACTCCGCCCAGTTCCGCCCATTCTCCGCCCCATGGCTGACTAATT |
| | TTTTTTATTTATGCAGAGGCCGAGGCCGCCTCTGCCTCTGAGCTATTCCAGAAGTAGTGAGGA |
| | GGCTTTTTTGGAGGCCTAGGCTTTTGCAAAAAGCTAACTTGTTTATTGCAGCTTATAATGGTTA |
| | CAAATAAAGCAATAGCATCACAAATTTCACAAATAAAGCATTTTTTTCACTGCATTCTAGTTG |
| | TGGTTTGTCCAAACTCATCAATGTATCTTATCATGTCTGTATACCGTCGACCTCTAGCTAGAGC |
| | TTGGCGTAATCATGGTCATAGCTGTTTCCTGTGTGAAATTGTTATCCGCTCACAATTCCACACA |
| | ACATACGAGCCGGAAGCATAAAGTGTAAAGCCTGGGGTGCCTAATGAGTGAGCTAACTCACA |
| | TTAATTGCGTTGCGCTCACTGCCCGCTTTCCAGTCGGGAAACCTGTCGTGCCAGCTGCATTAA |
| | TGAATCGGCCAACGCGCGGGGAGAGGCGGTTTGCGTATTGGGCGCTCTTCCGCTTCCTCGCTC |
| | ACTGACTCGCTGCGCTCGGTCGTTCGGCTGCGGCGAGCGGTATCAGCTCACTCAAAGGCGGT |
| | AATACGGTTATCCACAGAATCAGGGGATAACGCAGGAAAGAACATGTGAGCAAAAGGCCAG |
| | CAAAAGGCCAGGAACCGTAAAAAGGCCGCGTTGCTGGCGTTTTTCCATAGGCTCCGCCCCCC |
| | TGACGAGCATCACAAAAATCGACGCTCAAGTCAGAGGTGGCGAAACCCGACAGGACTATAA |
| | AGATACCAGGCGTTTCCCCCTGGAAGCTCCCTCGTGCGCTCTCCTGTTCCGACCCTGCCGCTT |
| | ACCGGATACCTGTCCGCCTTTCTCCCTTCGGGAAGCGTGGCGCTTTCTCATAGCTCACGCTGT |
| | AGGTATCTCAGTTCGGTGTAGGTCGTTCGCTCCAAGCTGGGCTGTGTGCACGAACCCCCCGTT |
| | CAGCCCGACCGCTGCGCCTTATCCGGTAACTATCGTCTTGAGTCCAACCCGGTAAGACACGAC |
| | TTATCGCCACTGGCAGCAGCCACTGGTAACAGGATTAGCAGAGCGAGGTATGTAGGCGGTGC |
| | TACAGAGTTCTTGAAGTGGTGGCCTAACTACGGCTACACTAGAAGAACAGTATTTGGTATCTG |
| | CGCTCTGCTGAAGCCAGTTACCTTCGGAAAAAGAGTTGGTAGCTCTTGATCCGGCAAACAAA |
| | CCACCGCTGGTAGCGGTTTTTTTGTTTGCAAGCAGCAGATTACGCGCAGAAAAAAAGGATCTC |
| | AAGAAGATCCTTTGATCTTTTCTACGGGGTCTGACGCTCAGTGGAACGAAAACTCACGTTAAG |
| | GGATTTTGGTCATGAGATTATCAAAAAGGATCTTCACCTAGATCCTTTTAAATTAAAAATGAA |
| | GTTTTAAATCAATCTAAAGTATATATGAGTAAACTTGGTCTGACAGTTACCAATGCTTAATCA |
| | GTGAGGCACCTATCTCAGCGATCTGTCTATTTCGTTCATCCATAGTTGCCTGACTCCCCGTCGT |
| | GTAGATAACTACGATACGGGAGGGCTTACCATCTGGCCCCAGTGCTGCAATGATACCGCGAG |
| | ACCCACGCTCACCGGCTCCAGATTTATCAGCAATAAACCAGCCAGCCGGAAGGGCCGAGCGC |
| | AGAAGTGGTCCTGCAACTTTATCCGCCTCCATCCAGTCTATTAATTGTTGCCGGGAAGCTAGA |
| | GTAAGTAGTTCGCCAGTTAATAGTTTGCGCAACGTTGTTGCCATTGCTACAGGCATCGTGGTG |
| | TCACGCTCGTCGTTTGGTATGGCTTCATTCAGCTCCGGTTCCCAACGATCAAGGCGAGTTACA |
| | TGATCCCCCATGTTGTGCAAAAAAGCGGTTAGCTCCTTCGGTCCTCCGATCGTTGTCAGAAGT |
| | AAGTTGGCCGCAGTGTTATCACTCATGGTTATGGCAGCACTGCATAATTCTCTTACTGTCATG |
| | CCATCCGTAAGATGCTTTTCTGTGACTGGTGAGTACTCAACCAAGTCATTCTGAGAATAGTGT |
| | ATGCGGCGACCGAGTTGCTCTTGCCCGGCGTCAATACGGGATAATACCGCGCCACATAGCAG |
| | AACTTTAAAAGTGCTCATCATTGGAAAACGTTCTTCGGGGCGAAAACTCTCAAGGATCTTACC |
| | GCTGTTGAGATCCAGTTCGATGTAACCCACTCGTGCACCCAACTGATCTTCAGCATCTTTTACT |
| | TTCACCAGCGTTTCTGGGTGAGCAAAAACAGGAAGGCAAAATGCCGCAAAAAAGGGAATAA |
| | GGGCGACACGGAAATGTTGAATACTCATACTCTTCCTTTTTCAATATTATTGAAGCATTTATC |
| | AGGGTTATTGTCTCATGAGCGGATACATATTTGAATGTATTTAGAAAAATAAACAAATAGGG |
| | GTTCCGCGCACATTTCCCCGAAAAGTGCCACCTgagggcctatttcccatgattccttcatatttgcatatacgatacaaggct |
| | gttagagagataattagaattaatttgactgtaaacacaaagatattagtacaaaatacgtgacgtagaaagtaataatttcttgggtagtttgcagttttaaaatt |
| | atgttttaaaatggactatcatatgcttaccgtaacttgaaagtatttcgatttcttggctttatatatcttgtggaaaggacGTGAGTCGTGGCTTTA |
| | TGCCGTTAGGCGTTGCTCAAGGGAGGACATCGATGTCACCTCCAATGACTAGGGTGTGAGTC |
| | GTGGCTTTATGCCGTTAGGCGTTGCTCAATTTTTT (SEQ ID NO: 379) |
| pU6- | AATTCTGTGGAATGTGTGTCAGTTAGGGTGTGGAAAGTCCCCAGGCTCCCCAGCAGGCAGAA |
| IB20_CRISPR_ | GTATGCAAAGCATGCATCTCAATTAGTCAGCAACCAGGTGTGGAAAGTCCCCAGGCTCCCCA |
| ID13 | GCAGGCAGAAGTATGCAAAGCATGCATCTCAATTAGTCAGCAACCATAGTCCCGCCCCTAAC |
| | TCCGCCCATCCCGCCCCTAACTCCGCCCAGTTCCGCCCATTCTCCGCCCCATGGCTGACTAATT |
| | TTTTTTATTTATGCAGAGGCCGAGGCCGCCTCTGCCTCTGAGCTATTCCAGAAGTAGTGAGGA |
| | GGCTTTTTTGGAGGCCTAGGCTTTTGCAAAAAGCTAACTTGTTTATTGCAGCTTATAATGGTTA |
| | CAAATAAAGCAATAGCATCACAAATTTCACAAATAAAGCATTTTTTTCACTGCATTCTAGTTG |
| | TGGTTTGTCCAAACTCATCAATGTATCTTATCATGTCTGTATACCGTCGACCTCTAGCTAGAGC |
| | TTGGCGTAATCATGGTCATAGCTGTTTCCTGTGTGAAATTGTTATCCGCTCACAATTCCACACA |
| | ACATACGAGCCGGAAGCATAAAGTGTAAAGCCTGGGGTGCCTAATGAGTGAGCTAACTCACA |
| | TTAATTGCGTTGCGCTCACTGCCCGCTTTCCAGTCGGGAAACCTGTCGTGCCAGCTGCATTAA |
| | TGAATCGGCCAACGCGCGGGGAGAGGCGGTTTGCGTATTGGGCGCTCTTCCGCTTCCTCGCTC |
| | ACTGACTCGCTGCGCTCGGTCGTTCGGCTGCGGCGAGCGGTATCAGCTCACTCAAAGGCGGT |
| | AATACGGTTATCCACAGAATCAGGGGATAACGCAGGAAAGAACATGTGAGCAAAAGGCCAG |
| | CAAAAGGCCAGGAACCGTAAAAAGGCCGCGTTGCTGGCGTTTTTCCATAGGCTCCGCCCCCC |
| | TGACGAGCATCACAAAAATCGACGCTCAAGTCAGAGGTGGCGAAACCCGACAGGACTATAA |
| | AGATACCAGGCGTTTCCCCCTGGAAGCTCCCTCGTGCGCTCTCCTGTTCCGACCCTGCCGCTT |
| | ACCGGATACCTGTCCGCCTTTCTCCCTTCGGGAAGCGTGGCGCTTTCTCATAGCTCACGCTGT |
| | AGGTATCTCAGTTCGGTGTAGGTCGTTCGCTCCAAGCTGGGCTGTGTGCACGAACCCCCCGTT |
| | CAGCCCGACCGCTGCGCCTTATCCGGTAACTATCGTCTTGAGTCCAACCCGGTAAGACACGAC |
| | TTATCGCCACTGGCAGCAGCCACTGGTAACAGGATTAGCAGAGCGAGGTATGTAGGCGGTGC |
| | TACAGAGTTCTTGAAGTGGTGGCCTAACTACGGCTACACTAGAAGAACAGTATTTGGTATCTG |
| | CGCTCTGCTGAAGCCAGTTACCTTCGGAAAAAGAGTTGGTAGCTCTTGATCCGGCAAACAAA |
| | CCACCGCTGGTAGCGGTTTTTTTGTTTGCAAGCAGCAGATTACGCGCAGAAAAAAAGGATCTC |
| | AAGAAGATCCTTTGATCTTTTCTACGGGGTCTGACGCTCAGTGGAACGAAAACTCACGTTAAG |
| | GGATTTTGGTCATGAGATTATCAAAAAGGATCTTCACCTAGATCCTTTTAAATTAAAAATGAA |
| | GTTTTAAATCAATCTAAAGTATATATGAGTAAACTTGGTCTGACAGTTACCAATGCTTAATCA |
| | GTGAGGCACCTATCTCAGCGATCTGTCTATTTCGTTCATCCATAGTTGCCTGACTCCCCGTCGT |
| | GTAGATAACTACGATACGGGAGGGCTTACCATCTGGCCCCAGTGCTGCAATGATACCGCGAG |
| | ACCCACGCTCACCGGCTCCAGATTTATCAGCAATAAACCAGCCAGCCGGAAGGGCCGAGCGC |
| | AGAAGTGGTCCTGCAACTTTATCCGCCTCCATCCAGTCTATTAATTGTTGCCGGGAAGCTAGA |
| | GTAAGTAGTTCGCCAGTTAATAGTTTGCGCAACGTTGTTGCCATTGCTACAGGCATCGTGGTG |
| | TCACGCTCGTCGTTTGGTATGGCTTCATTCAGCTCCGGTTCCCAACGATCAAGGCGAGTTACA |
| | TGATCCCCCATGTTGTGCAAAAAAGCGGTTAGCTCCTTCGGTCCTCCGATCGTTGTCAGAAGT |
| | AAGTTGGCCGCAGTGTTATCACTCATGGTTATGGCAGCACTGCATAATTCTCTTACTGTCATG |
| | CCATCCGTAAGATGCTTTTCTGTGACTGGTGAGTACTCAACCAAGTCATTCTGAGAATAGTGT |
| | ATGCGGCGACCGAGTTGCTCTTGCCCGGCGTCAATACGGGATAATACCGCGCCACATAGCAG |
| | AACTTTAAAAGTGCTCATCATTGGAAAACGTTCTTCGGGGCGAAAACTCTCAAGGATCTTACC |
| | GCTGTTGAGATCCAGTTCGATGTAACCCACTCGTGCACCCAACTGATCTTCAGCATCTTTTACT |
| | TTCACCAGCGTTTCTGGGTGAGCAAAAACAGGAAGGCAAAATGCCGCAAAAAAGGGAATAA |
| | GGGCGACACGGAAATGTTGAATACTCATACTCTTCCTTTTTCAATATTATTGAAGCATTTATC |
| | AGGGTTATTGTCTCATGAGCGGATACATATTTGAATGTATTTAGAAAAATAAACAAATAGGG |
| | GTTCCGCGCACATTTCCCCGAAAAGTGCCACCTgagggcctatttcccatgattccttcatatttgcatatacgatacaaggct |
| | gttagagagataattagaattaatttgactgtaaacacaaagatattagtacaaaatacgtgacgtagaaagtaataatttcttgggtagtttgcagttttaaaatt |
| | atgttttaaaatggactatcatatgcttaccgtaacttgaaagtatttcgatttcttggctttatatatcttgtggaaaggacGTGAGTCGTGGCTTTA |
| | TGCCGTTAGGCGTTGCTCAATTAACAGCTGACCCAATAAGTGGCAGAGTGCTAAGGTGAGTC |
| | GTGGCTTTATGCCGTTAGGCGTTGCTCAATTTTTT (SEQ ID NO: 380) |
| pU6- | AATTCTGTGGAATGTGTGTCAGTTAGGGTGTGGAAAGTCCCCAGGCTCCCCAGCAGGCAGAA |
| IB20_CRISPR_ | GTATGCAAAGCATGCATCTCAATTAGTCAGCAACCAGGTGTGGAAAGTCCCCAGGCTCCCCA |
| ID16 | GCAGGCAGAAGTATGCAAAGCATGCATCTCAATTAGTCAGCAACCATAGTCCCGCCCCTAAC |
| | TCCGCCCATCCCGCCCCTAACTCCGCCCAGTTCCGCCCATTCTCCGCCCCATGGCTGACTAATT |
| | TTTTTTATTTATGCAGAGGCCGAGGCCGCCTCTGCCTCTGAGCTATTCCAGAAGTAGTGAGGA |
| | GGCTTTTTTGGAGGCCTAGGCTTTTGCAAAAAGCTAACTTGTTTATTGCAGCTTATAATGGTTA |
| | CAAATAAAGCAATAGCATCACAAATTTCACAAATAAAGCATTTTTTTCACTGCATTCTAGTTG |
| | TGGTTTGTCCAAACTCATCAATGTATCTTATCATGTCTGTATACCGTCGACCTCTAGCTAGAGC |
| | TTGGCGTAATCATGGTCATAGCTGTTTCCTGTGTGAAATTGTTATCCGCTCACAATTCCACACA |
| | ACATACGAGCCGGAAGCATAAAGTGTAAAGCCTGGGGTGCCTAATGAGTGAGCTAACTCACA |
| | TTAATTGCGTTGCGCTCACTGCCCGCTTTCCAGTCGGGAAACCTGTCGTGCCAGCTGCATTAA |
| | TGAATCGGCCAACGCGCGGGGAGAGGCGGTTTGCGTATTGGGCGCTCTTCCGCTTCCTCGCTC |
| | ACTGACTCGCTGCGCTCGGTCGTTCGGCTGCGGCGAGCGGTATCAGCTCACTCAAAGGCGGT |
| | AATACGGTTATCCACAGAATCAGGGGATAACGCAGGAAAGAACATGTGAGCAAAAGGCCAG |
| | CAAAAGGCCAGGAACCGTAAAAAGGCCGCGTTGCTGGCGTTTTTCCATAGGCTCCGCCCCCC |
| | TGACGAGCATCACAAAAATCGACGCTCAAGTCAGAGGTGGCGAAACCCGACAGGACTATAA |
| | AGATACCAGGCGTTTCCCCCTGGAAGCTCCCTCGTGCGCTCTCCTGTTCCGACCCTGCCGCTT |
| | ACCGGATACCTGTCCGCCTTTCTCCCTTCGGGAAGCGTGGCGCTTTCTCATAGCTCACGCTGT |
| | AGGTATCTCAGTTCGGTGTAGGTCGTTCGCTCCAAGCTGGGCTGTGTGCACGAACCCCCCGTT |
| | CAGCCCGACCGCTGCGCCTTATCCGGTAACTATCGTCTTGAGTCCAACCCGGTAAGACACGAC |
| | TTATCGCCACTGGCAGCAGCCACTGGTAACAGGATTAGCAGAGCGAGGTATGTAGGCGGTGC |
| | TACAGAGTTCTTGAAGTGGTGGCCTAACTACGGCTACACTAGAAGAACAGTATTTGGTATCTG |
| | CGCTCTGCTGAAGCCAGTTACCTTCGGAAAAAGAGTTGGTAGCTCTTGATCCGGCAAACAAA |
| | CCACCGCTGGTAGCGGTTTTTTTGTTTGCAAGCAGCAGATTACGCGCAGAAAAAAAGGATCTC |
| | AAGAAGATCCTTTGATCTTTTCTACGGGGTCTGACGCTCAGTGGAACGAAAACTCACGTTAAG |
| | GGATTTTGGTCATGAGATTATCAAAAAGGATCTTCACCTAGATCCTTTTAAATTAAAAATGAA |
| | GTTTTAAATCAATCTAAAGTATATATGAGTAAACTTGGTCTGACAGTTACCAATGCTTAATCA |
| | GTGAGGCACCTATCTCAGCGATCTGTCTATTTCGTTCATCCATAGTTGCCTGACTCCCCGTCGT |
| | GTAGATAACTACGATACGGGAGGGCTTACCATCTGGCCCCAGTGCTGCAATGATACCGCGAG |
| | ACCCACGCTCACCGGCTCCAGATTTATCAGCAATAAACCAGCCAGCCGGAAGGGCCGAGCGC |
| | AGAAGTGGTCCTGCAACTTTATCCGCCTCCATCCAGTCTATTAATTGTTGCCGGGAAGCTAGA |
| | GTAAGTAGTTCGCCAGTTAATAGTTTGCGCAACGTTGTTGCCATTGCTACAGGCATCGTGGTG |
| | TCACGCTCGTCGTTTGGTATGGCTTCATTCAGCTCCGGTTCCCAACGATCAAGGCGAGTTACA |
| | TGATCCCCCATGTTGTGCAAAAAAGCGGTTAGCTCCTTCGGTCCTCCGATCGTTGTCAGAAGT |
| | AAGTTGGCCGCAGTGTTATCACTCATGGTTATGGCAGCACTGCATAATTCTCTTACTGTCATG |
| | CCATCCGTAAGATGCTTTTCTGTGACTGGTGAGTACTCAACCAAGTCATTCTGAGAATAGTGT |
| | ATGCGGCGACCGAGTTGCTCTTGCCCGGCGTCAATACGGGATAATACCGCGCCACATAGCAG |
| | AACTTTAAAAGTGCTCATCATTGGAAAACGTTCTTCGGGGCGAAAACTCTCAAGGATCTTACC |
| | GCTGTTGAGATCCAGTTCGATGTAACCCACTCGTGCACCCAACTGATCTTCAGCATCTTTTACT |
| | TTCACCAGCGTTTCTGGGTGAGCAAAAACAGGAAGGCAAAATGCCGCAAAAAAGGGAATAA |
| | GGGCGACACGGAAATGTTGAATACTCATACTCTTCCTTTTTCAATATTATTGAAGCATTTATC |
| | AGGGTTATTGTCTCATGAGCGGATACATATTTGAATGTATTTAGAAAAATAAACAAATAGGG |
| | GTTCCGCGCACATTTCCCCGAAAAGTGCCACCTgagggcctatttcccatgattccttcatatttgcatatacgatacaaggct |
| | gttagagagataattagaattaatttgactgtaaacacaaagatattagtacaaaatacgtgacgtagaaagtaataatttcttgggtagtttgcagttttaaaatt |
| | atgttttaaaatggactatcatatgcttaccgtaacttgaaagtatttcgatttettggctttatatatcttgtggaaaggacGTGAGTCGTGGCTTTA |
| | TGCCGTTAGGCGTTGCTCAAGACCATCAGGAAACATTAACGTACTGATGTTAACAGTGAGTC |
| | GTGGCTTTATGCCGTTAGGCGTTGCTCAATTTTTT (SEQ ID NO: 381) |
| pU6- | AATTCTGTGGAATGTGTGTCAGTTAGGGTGTGGAAAGTCCCCAGGCTCCCCAGCAGGCAGAA |
| IB20_CRISPR_ | GTATGCAAAGCATGCATCTCAATTAGTCAGCAACCAGGTGTGGAAAGTCCCCAGGCTCCCCA |
| ID21 | GCAGGCAGAAGTATGCAAAGCATGCATCTCAATTAGTCAGCAACCATAGTCCCGCCCCTAAC |
| | TCCGCCCATCCCGCCCCTAACTCCGCCCAGTTCCGCCCATTCTCCGCCCCATGGCTGACTAATT |
| | TTTTTTATTTATGCAGAGGCCGAGGCCGCCTCTGCCTCTGAGCTATTCCAGAAGTAGTGAGGA |
| | GGCTTTTTTGGAGGCCTAGGCTTTTGCAAAAAGCTAACTTGTTTATTGCAGCTTATAATGGTTA |
| | CAAATAAAGCAATAGCATCACAAATTTCACAAATAAAGCATTTTTTTCACTGCATTCTAGTTG |
| | TGGTTTGTCCAAACTCATCAATGTATCTTATCATGTCTGTATACCGTCGACCTCTAGCTAGAGC |
| | TTGGCGTAATCATGGTCATAGCTGTTTCCTGTGTGAAATTGTTATCCGCTCACAATTCCACACA |
| | ACATACGAGCCGGAAGCATAAAGTGTAAAGCCTGGGGTGCCTAATGAGTGAGCTAACTCACA |
| | TTAATTGCGTTGCGCTCACTGCCCGCTTTCCAGTCGGGAAACCTGTCGTGCCAGCTGCATTAA |
| | TGAATCGGCCAACGCGCGGGGAGAGGCGGTTTGCGTATTGGGCGCTCTTCCGCTTCCTCGCTC |
| | ACTGACTCGCTGCGCTCGGTCGTTCGGCTGCGGCGAGCGGTATCAGCTCACTCAAAGGCGGT |
| | AATACGGTTATCCACAGAATCAGGGGATAACGCAGGAAAGAACATGTGAGCAAAAGGCCAG |
| | CAAAAGGCCAGGAACCGTAAAAAGGCCGCGTTGCTGGCGTTTTTCCATAGGCTCCGCCCCCC |
| | TGACGAGCATCACAAAAATCGACGCTCAAGTCAGAGGTGGCGAAACCCGACAGGACTATAA |
| | AGATACCAGGCGTTTCCCCCTGGAAGCTCCCTCGTGCGCTCTCCTGTTCCGACCCTGCCGCTT |
| | ACCGGATACCTGTCCGCCTTTCTCCCTTCGGGAAGCGTGGCGCTTTCTCATAGCTCACGCTGT |
| | AGGTATCTCAGTTCGGTGTAGGTCGTTCGCTCCAAGCTGGGCTGTGTGCACGAACCCCCCGTT |
| | CAGCCCGACCGCTGCGCCTTATCCGGTAACTATCGTCTTGAGTCCAACCCGGTAAGACACGAC |
| | TTATCGCCACTGGCAGCAGCCACTGGTAACAGGATTAGCAGAGCGAGGTATGTAGGCGGTGC |
| | TACAGAGTTCTTGAAGTGGTGGCCTAACTACGGCTACACTAGAAGAACAGTATTTGGTATCTG |
| | CGCTCTGCTGAAGCCAGTTACCTTCGGAAAAAGAGTTGGTAGCTCTTGATCCGGCAAACAAA |
| | CCACCGCTGGTAGCGGTTTTTTTGTTTGCAAGCAGCAGATTACGCGCAGAAAAAAAGGATCTC |
| | AAGAAGATCCTTTGATCTTTTCTACGGGGTCTGACGCTCAGTGGAACGAAAACTCACGTTAAG |
| | GGATTTTGGTCATGAGATTATCAAAAAGGATCTTCACCTAGATCCTTTTAAATTAAAAATGAA |
| | GTTTTAAATCAATCTAAAGTATATATGAGTAAACTTGGTCTGACAGTTACCAATGCTTAATCA |
| | GTGAGGCACCTATCTCAGCGATCTGTCTATTTCGTTCATCCATAGTTGCCTGACTCCCCGTCGT |
| | GTAGATAACTACGATACGGGAGGGCTTACCATCTGGCCCCAGTGCTGCAATGATACCGCGAG |
| | ACCCACGCTCACCGGCTCCAGATTTATCAGCAATAAACCAGCCAGCCGGAAGGGCCGAGCGC |
| | AGAAGTGGTCCTGCAACTTTATCCGCCTCCATCCAGTCTATTAATTGTTGCCGGGAAGCTAGA |
| | GTAAGTAGTTCGCCAGTTAATAGTTTGCGCAACGTTGTTGCCATTGCTACAGGCATCGTGGTG |
| | TCACGCTCGTCGTTTGGTATGGCTTCATTCAGCTCCGGTTCCCAACGATCAAGGCGAGTTACA |
| | TGATCCCCCATGTTGTGCAAAAAAGCGGTTAGCTCCTTCGGTCCTCCGATCGTTGTCAGAAGT |
| | AAGTTGGCCGCAGTGTTATCACTCATGGTTATGGCAGCACTGCATAATTCTCTTACTGTCATG |
| | CCATCCGTAAGATGCTTTTCTGTGACTGGTGAGTACTCAACCAAGTCATTCTGAGAATAGTGT |
| | ATGCGGCGACCGAGTTGCTCTTGCCCGGCGTCAATACGGGATAATACCGCGCCACATAGCAG |
| | AACTTTAAAAGTGCTCATCATTGGAAAACGTTCTTCGGGGCGAAAACTCTCAAGGATCTTACC |
| | GCTGTTGAGATCCAGTTCGATGTAACCCACTCGTGCACCCAACTGATCTTCAGCATCTTTTACT |
| | TTCACCAGCGTTTCTGGGTGAGCAAAAACAGGAAGGCAAAATGCCGCAAAAAAGGGAATAA |
| | GGGCGACACGGAAATGTTGAATACTCATACTCTTCCTTTTTCAATATTATTGAAGCATTTATC |
| | AGGGTTATTGTCTCATGAGCGGATACATATTTGAATGTATTTAGAAAAATAAACAAATAGGG |
| | GTTCCGCGCACATTTCCCCGAAAAGTGCCACCTgagggcctatttcccatgattccttcatatttgcatatacgatacaaggct |
| | gttagagagataattagaattaatttgactgtaaacacaaagatattagtacaaaatacgtgacgtagaaagtaataatttcttgggtagtttgcagttttaaaatt |
| | atgttttaaaatggactatcatatgcttaccgtaacttgaaagtatttcgatttcttggctttatatatcttgtggaaaggacGTGAGTCGTGGCTTTA |
| | TGCCGTTAGGCGTTGCTCAATTAAAAACACAACATCAGTGCATGTTGGGGATTCCGTGAGTCG |
| | TGGCTTTATGCCGTTAGGCGTTGCTCAATTTTTT (SEQ ID NO: 382) |
| pU6- | AATTCTGTGGAATGTGTGTCAGTTAGGGTGTGGAAAGTCCCCAGGCTCCCCAGCAGGCAGAA |
| IB20_CRISPR_ | GTATGCAAAGCATGCATCTCAATTAGTCAGCAACCAGGTGTGGAAAGTCCCCAGGCTCCCCA |
| ID51 | GCAGGCAGAAGTATGCAAAGCATGCATCTCAATTAGTCAGCAACCATAGTCCCGCCCCTAAC |
| | TCCGCCCATCCCGCCCCTAACTCCGCCCAGTTCCGCCCATTCTCCGCCCCATGGCTGACTAATT |
| | TTTTTTATTTATGCAGAGGCCGAGGCCGCCTCTGCCTCTGAGCTATTCCAGAAGTAGTGAGGA |
| | GGCTTTTTTGGAGGCCTAGGCTTTTGCAAAAAGCTAACTTGTTTATTGCAGCTTATAATGGTTA |
| | CAAATAAAGCAATAGCATCACAAATTTCACAAATAAAGCATTTTTTTCACTGCATTCTAGTTG |
| | TGGTTTGTCCAAACTCATCAATGTATCTTATCATGTCTGTATACCGTCGACCTCTAGCTAGAGC |
| | TTGGCGTAATCATGGTCATAGCTGTTTCCTGTGTGAAATTGTTATCCGCTCACAATTCCACACA |
| | ACATACGAGCCGGAAGCATAAAGTGTAAAGCCTGGGGTGCCTAATGAGTGAGCTAACTCACA |
| | TTAATTGCGTTGCGCTCACTGCCCGCTTTCCAGTCGGGAAACCTGTCGTGCCAGCTGCATTAA |
| | TGAATCGGCCAACGCGCGGGGAGAGGCGGTTTGCGTATTGGGCGCTCTTCCGCTTCCTCGCTC |
| | ACTGACTCGCTGCGCTCGGTCGTTCGGCTGCGGCGAGCGGTATCAGCTCACTCAAAGGCGGT |
| | AATACGGTTATCCACAGAATCAGGGGATAACGCAGGAAAGAACATGTGAGCAAAAGGCCAG |
| | CAAAAGGCCAGGAACCGTAAAAAGGCCGCGTTGCTGGCGTTTTTCCATAGGCTCCGCCCCCC |
| | TGACGAGCATCACAAAAATCGACGCTCAAGTCAGAGGTGGCGAAACCCGACAGGACTATAA |
| | AGATACCAGGCGTTTCCCCCTGGAAGCTCCCTCGTGCGCTCTCCTGTTCCGACCCTGCCGCTT |
| | ACCGGATACCTGTCCGCCTTTCTCCCTTCGGGAAGCGTGGCGCTTTCTCATAGCTCACGCTGT |
| | AGGTATCTCAGTTCGGTGTAGGTCGTTCGCTCCAAGCTGGGCTGTGTGCACGAACCCCCCGTT |
| | CAGCCCGACCGCTGCGCCTTATCCGGTAACTATCGTCTTGAGTCCAACCCGGTAAGACACGAC |
| | TTATCGCCACTGGCAGCAGCCACTGGTAACAGGATTAGCAGAGCGAGGTATGTAGGCGGTGC |
| | TACAGAGTTCTTGAAGTGGTGGCCTAACTACGGCTACACTAGAAGAACAGTATTTGGTATCTG |
| | CGCTCTGCTGAAGCCAGTTACCTTCGGAAAAAGAGTTGGTAGCTCTTGATCCGGCAAACAAA |
| | CCACCGCTGGTAGCGGTTTTTTTGTTTGCAAGCAGCAGATTACGCGCAGAAAAAAAGGATCTC |
| | AAGAAGATCCTTTGATCTTTTCTACGGGGTCTGACGCTCAGTGGAACGAAAACTCACGTTAAG |
| | GGATTTTGGTCATGAGATTATCAAAAAGGATCTTCACCTAGATCCTTTTAAATTAAAAATGAA |
| | GTTTTAAATCAATCTAAAGTATATATGAGTAAACTTGGTCTGACAGTTACCAATGCTTAATCA |
| | GTGAGGCACCTATCTCAGCGATCTGTCTATTTCGTTCATCCATAGTTGCCTGACTCCCCGTCGT |
| | GTAGATAACTACGATACGGGAGGGCTTACCATCTGGCCCCAGTGCTGCAATGATACCGCGAG |
| | ACCCACGCTCACCGGCTCCAGATTTATCAGCAATAAACCAGCCAGCCGGAAGGGCCGAGCGC |
| | AGAAGTGGTCCTGCAACTTTATCCGCCTCCATCCAGTCTATTAATTGTTGCCGGGAAGCTAGA |
| | GTAAGTAGTTCGCCAGTTAATAGTTTGCGCAACGTTGTTGCCATTGCTACAGGCATCGTGGTG |
| | TCACGCTCGTCGTTTGGTATGGCTTCATTCAGCTCCGGTTCCCAACGATCAAGGCGAGTTACA |
| | TGATCCCCCATGTTGTGCAAAAAAGCGGTTAGCTCCTTCGGTCCTCCGATCGTTGTCAGAAGT |
| | AAGTTGGCCGCAGTGTTATCACTCATGGTTATGGCAGCACTGCATAATTCTCTTACTGTCATG |
| | CCATCCGTAAGATGCTTTTCTGTGACTGGTGAGTACTCAACCAAGTCATTCTGAGAATAGTGT |
| | ATGCGGCGACCGAGTTGCTCTTGCCCGGCGTCAATACGGGATAATACCGCGCCACATAGCAG |
| | AACTTTAAAAGTGCTCATCATTGGAAAACGTTCTTCGGGGCGAAAACTCTCAAGGATCTTACC |
| | GCTGTTGAGATCCAGTTCGATGTAACCCACTCGTGCACCCAACTGATCTTCAGCATCTTTTACT |
| | TTCACCAGCGTTTCTGGGTGAGCAAAAACAGGAAGGCAAAATGCCGCAAAAAAGGGAATAA |
| | GGGCGACACGGAAATGTTGAATACTCATACTCTTCCTTTTTCAATATTATTGAAGCATTTATC |
| | AGGGTTATTGTCTCATGAGCGGATACATATTTGAATGTATTTAGAAAAATAAACAAATAGGG |
| | GTTCCGCGCACATTTCCCCGAAAAGTGCCACCTgagggcctatttcccatgattccttcatatttgcatatacgatacaaggct |
| | gttagagagataattagaattaatttgactgtaaacacaaagatattagtacaaaatacgtgacgtagaaagtaataatttcttgggtagtttgcagttttaaaatt |
| | atgttttaaaatggactatcatatgcttaccgtaacttgaaagtatttcgatttcttggctttatatatcttgtggaaaggacGTGAGTCGTGGCTTTA |
| | TGCCGTTAGGCGTTGCTCAACGGAAGGATCCCACAATCACTCTCAGAATGTTCTCGTGAGTCG |
| | TGGCTTTATGCCGTTAGGCGTTGCTCAATTTTTT (SEQ ID NO: 383) |
| pU6- | AATTCTGTGGAATGTGTGTCAGTTAGGGTGTGGAAAGTCCCCAGGCTCCCCAGCAGGCAGAA |
| IB20_CRISPR_ | GTATGCAAAGCATGCATCTCAATTAGTCAGCAACCAGGTGTGGAAAGTCCCCAGGCTCCCCA |
| ID52 | GCAGGCAGAAGTATGCAAAGCATGCATCTCAATTAGTCAGCAACCATAGTCCCGCCCCTAAC |
| | TCCGCCCATCCCGCCCCTAACTCCGCCCAGTTCCGCCCATTCTCCGCCCCATGGCTGACTAATT |
| | TTTTTTATTTATGCAGAGGCCGAGGCCGCCTCTGCCTCTGAGCTATTCCAGAAGTAGTGAGGA |
| | GGCTTTTTTGGAGGCCTAGGCTTTTGCAAAAAGCTAACTTGTTTATTGCAGCTTATAATGGTTA |
| | CAAATAAAGCAATAGCATCACAAATTTCACAAATAAAGCATTTTTTTCACTGCATTCTAGTTG |
| | TGGTTTGTCCAAACTCATCAATGTATCTTATCATGTCTGTATACCGTCGACCTCTAGCTAGAGC |
| | TTGGCGTAATCATGGTCATAGCTGTTTCCTGTGTGAAATTGTTATCCGCTCACAATTCCACACA |
| | ACATACGAGCCGGAAGCATAAAGTGTAAAGCCTGGGGTGCCTAATGAGTGAGCTAACTCACA |
| | TTAATTGCGTTGCGCTCACTGCCCGCTTTCCAGTCGGGAAACCTGTCGTGCCAGCTGCATTAA |
| | TGAATCGGCCAACGCGCGGGGAGAGGCGGTTTGCGTATTGGGCGCTCTTCCGCTTCCTCGCTC |
| | ACTGACTCGCTGCGCTCGGTCGTTCGGCTGCGGCGAGCGGTATCAGCTCACTCAAAGGCGGT |
| | AATACGGTTATCCACAGAATCAGGGGATAACGCAGGAAAGAACATGTGAGCAAAAGGCCAG |
| | CAAAAGGCCAGGAACCGTAAAAAGGCCGCGTTGCTGGCGTTTTTCCATAGGCTCCGCCCCCC |
| | TGACGAGCATCACAAAAATCGACGCTCAAGTCAGAGGTGGCGAAACCCGACAGGACTATAA |
| | AGATACCAGGCGTTTCCCCCTGGAAGCTCCCTCGTGCGCTCTCCTGTTCCGACCCTGCCGCTT |
| | ACCGGATACCTGTCCGCCTTTCTCCCTTCGGGAAGCGTGGCGCTTTCTCATAGCTCACGCTGT |
| | AGGTATCTCAGTTCGGTGTAGGTCGTTCGCTCCAAGCTGGGCTGTGTGCACGAACCCCCCGTT |
| | CAGCCCGACCGCTGCGCCTTATCCGGTAACTATCGTCTTGAGTCCAACCCGGTAAGACACGAC |
| | TTATCGCCACTGGCAGCAGCCACTGGTAACAGGATTAGCAGAGCGAGGTATGTAGGCGGTGC |
| | TACAGAGTTCTTGAAGTGGTGGCCTAACTACGGCTACACTAGAAGAACAGTATTTGGTATCTG |
| | CGCTCTGCTGAAGCCAGTTACCTTCGGAAAAAGAGTTGGTAGCTCTTGATCCGGCAAACAAA |
| | CCACCGCTGGTAGCGGTTTTTTTGTTTGCAAGCAGCAGATTACGCGCAGAAAAAAAGGATCTC |
| | AAGAAGATCCTTTGATCTTTTCTACGGGGTCTGACGCTCAGTGGAACGAAAACTCACGTTAAG |
| | GGATTTTGGTCATGAGATTATCAAAAAGGATCTTCACCTAGATCCTTTTAAATTAAAAATGAA |
| | GTTTTAAATCAATCTAAAGTATATATGAGTAAACTTGGTCTGACAGTTACCAATGCTTAATCA |
| | GTGAGGCACCTATCTCAGCGATCTGTCTATTTCGTTCATCCATAGTTGCCTGACTCCCCGTCGT |
| | GTAGATAACTACGATACGGGAGGGCTTACCATCTGGCCCCAGTGCTGCAATGATACCGCGAG |
| | ACCCACGCTCACCGGCTCCAGATTTATCAGCAATAAACCAGCCAGCCGGAAGGGCCGAGCGC |
| | AGAAGTGGTCCTGCAACTTTATCCGCCTCCATCCAGTCTATTAATTGTTGCCGGGAAGCTAGA |
| | GTAAGTAGTTCGCCAGTTAATAGTTTGCGCAACGTTGTTGCCATTGCTACAGGCATCGTGGTG |
| | TCACGCTCGTCGTTTGGTATGGCTTCATTCAGCTCCGGTTCCCAACGATCAAGGCGAGTTACA |
| | TGATCCCCCATGTTGTGCAAAAAAGCGGTTAGCTCCTTCGGTCCTCCGATCGTTGTCAGAAGT |
| | AAGTTGGCCGCAGTGTTATCACTCATGGTTATGGCAGCACTGCATAATTCTCTTACTGTCATG |
| | CCATCCGTAAGATGCTTTTCTGTGACTGGTGAGTACTCAACCAAGTCATTCTGAGAATAGTGT |
| | ATGCGGCGACCGAGTTGCTCTTGCCCGGCGTCAATACGGGATAATACCGCGCCACATAGCAG |
| | AACTTTAAAAGTGCTCATCATTGGAAAACGTTCTTCGGGGCGAAAACTCTCAAGGATCTTACC |
| | GCTGTTGAGATCCAGTTCGATGTAACCCACTCGTGCACCCAACTGATCTTCAGCATCTTTTACT |
| | TTCACCAGCGTTTCTGGGTGAGCAAAAACAGGAAGGCAAAATGCCGCAAAAAAGGGAATAA |
| | GGGCGACACGGAAATGTTGAATACTCATACTCTTCCTTTTTCAATATTATTGAAGCATTTATC |
| | AGGGTTATTGTCTCATGAGCGGATACATATTTGAATGTATTTAGAAAAATAAACAAATAGGG |
| | GTTCCGCGCACATTTCCCCGAAAAGTGCCACCTgagggcctatttcccatgattccttcatatttgcatatacgatacaaggct |
| | gttagagagataattagaattaatttgactgtaaacacaaagatattagtacaaaatacgtgacgtagaaagtaataatttcttgggtagtttgcagttttaaaatt |
| | atgttttaaaatggactatcatatgcttaccgtaacttgaaagtatttcgatttcttggctttatatatcttgtggaaaggacGTGAGTCGTGGCTTTA |
| | TGCCGTTAGGCGTTGCTCAATGACTAGAGAGGGTCCATTTTGAGGATGGGGGTGTGTGAGTC |
| | GTGGCTTTATGCCGTTAGGCGTTGCTCAATTTTTT (SEQ ID NO: 384) |
| pU6- | AATTCTGTGGAATGTGTGTCAGTTAGGGTGTGGAAAGTCCCCAGGCTCCCCAGCAGGCAGAA |
| IB20_CRISPR_ | GTATGCAAAGCATGCATCTCAATTAGTCAGCAACCAGGTGTGGAAAGTCCCCAGGCTCCCCA |
| ID73 | GCAGGCAGAAGTATGCAAAGCATGCATCTCAATTAGTCAGCAACCATAGTCCCGCCCCTAAC |
| | TCCGCCCATCCCGCCCCTAACTCCGCCCAGTTCCGCCCATTCTCCGCCCCATGGCTGACTAATT |
| | TTTTTTATTTATGCAGAGGCCGAGGCCGCCTCTGCCTCTGAGCTATTCCAGAAGTAGTGAGGA |
| | GGCTTTTTTGGAGGCCTAGGCTTTTGCAAAAAGCTAACTTGTTTATTGCAGCTTATAATGGTTA |
| | CAAATAAAGCAATAGCATCACAAATTTCACAAATAAAGCATTTTTTTCACTGCATTCTAGTTG |
| | TGGTTTGTCCAAACTCATCAATGTATCTTATCATGTCTGTATACCGTCGACCTCTAGCTAGAGC |
| | TTGGCGTAATCATGGTCATAGCTGTTTCCTGTGTGAAATTGTTATCCGCTCACAATTCCACACA |
| | ACATACGAGCCGGAAGCATAAAGTGTAAAGCCTGGGGTGCCTAATGAGTGAGCTAACTCACA |
| | TTAATTGCGTTGCGCTCACTGCCCGCTTTCCAGTCGGGAAACCTGTCGTGCCAGCTGCATTAA |
| | TGAATCGGCCAACGCGCGGGGAGAGGCGGTTTGCGTATTGGGCGCTCTTCCGCTTCCTCGCTC |
| | ACTGACTCGCTGCGCTCGGTCGTTCGGCTGCGGCGAGCGGTATCAGCTCACTCAAAGGCGGT |
| | AATACGGTTATCCACAGAATCAGGGGATAACGCAGGAAAGAACATGTGAGCAAAAGGCCAG |
| | CAAAAGGCCAGGAACCGTAAAAAGGCCGCGTTGCTGGCGTTTTTCCATAGGCTCCGCCCCCC |
| | TGACGAGCATCACAAAAATCGACGCTCAAGTCAGAGGTGGCGAAACCCGACAGGACTATAA |
| | AGATACCAGGCGTTTCCCCCTGGAAGCTCCCTCGTGCGCTCTCCTGTTCCGACCCTGCCGCTT |
| | ACCGGATACCTGTCCGCCTTTCTCCCTTCGGGAAGCGTGGCGCTTTCTCATAGCTCACGCTGT |
| | AGGTATCTCAGTTCGGTGTAGGTCGTTCGCTCCAAGCTGGGCTGTGTGCACGAACCCCCCGTT |
| | CAGCCCGACCGCTGCGCCTTATCCGGTAACTATCGTCTTGAGTCCAACCCGGTAAGACACGAC |
| | TTATCGCCACTGGCAGCAGCCACTGGTAACAGGATTAGCAGAGCGAGGTATGTAGGCGGTGC |
| | TACAGAGTTCTTGAAGTGGTGGCCTAACTACGGCTACACTAGAAGAACAGTATTTGGTATCTG |
| | CGCTCTGCTGAAGCCAGTTACCTTCGGAAAAAGAGTTGGTAGCTCTTGATCCGGCAAACAAA |
| | CCACCGCTGGTAGCGGTTTTTTTGTTTGCAAGCAGCAGATTACGCGCAGAAAAAAAGGATCTC |
| | AAGAAGATCCTTTGATCTTTTCTACGGGGTCTGACGCTCAGTGGAACGAAAACTCACGTTAAG |
| | GGATTTTGGTCATGAGATTATCAAAAAGGATCTTCACCTAGATCCTTTTAAATTAAAAATGAA |
| | GTTTTAAATCAATCTAAAGTATATATGAGTAAACTTGGTCTGACAGTTACCAATGCTTAATCA |
| | GTGAGGCACCTATCTCAGCGATCTGTCTATTTCGTTCATCCATAGTTGCCTGACTCCCCGTCGT |
| | GTAGATAACTACGATACGGGAGGGCTTACCATCTGGCCCCAGTGCTGCAATGATACCGCGAG |
| | ACCCACGCTCACCGGCTCCAGATTTATCAGCAATAAACCAGCCAGCCGGAAGGGCCGAGCGC |
| | AGAAGTGGTCCTGCAACTTTATCCGCCTCCATCCAGTCTATTAATTGTTGCCGGGAAGCTAGA |
| | GTAAGTAGTTCGCCAGTTAATAGTTTGCGCAACGTTGTTGCCATTGCTACAGGCATCGTGGTG |
| | TCACGCTCGTCGTTTGGTATGGCTTCATTCAGCTCCGGTTCCCAACGATCAAGGCGAGTTACA |
| | TGATCCCCCATGTTGTGCAAAAAAGCGGTTAGCTCCTTCGGTCCTCCGATCGTTGTCAGAAGT |
| | AAGTTGGCCGCAGTGTTATCACTCATGGTTATGGCAGCACTGCATAATTCTCTTACTGTCATG |
| | CCATCCGTAAGATGCTTTTCTGTGACTGGTGAGTACTCAACCAAGTCATTCTGAGAATAGTGT |
| | ATGCGGCGACCGAGTTGCTCTTGCCCGGCGTCAATACGGGATAATACCGCGCCACATAGCAG |
| | AACTTTAAAAGTGCTCATCATTGGAAAACGTTCTTCGGGGCGAAAACTCTCAAGGATCTTACC |
| | GCTGTTGAGATCCAGTTCGATGTAACCCACTCGTGCACCCAACTGATCTTCAGCATCTTTTACT |
| | TTCACCAGCGTTTCTGGGTGAGCAAAAACAGGAAGGCAAAATGCCGCAAAAAAGGGAATAA |
| | GGGCGACACGGAAATGTTGAATACTCATACTCTTCCTTTTTCAATATTATTGAAGCATTTATC |
| | AGGGTTATTGTCTCATGAGCGGATACATATTTGAATGTATTTAGAAAAATAAACAAATAGGG |
| | GTTCCGCGCACATTTCCCCGAAAAGTGCCACCTgagggcctatttcccatgattccttcatatttgcatatacgatacaaggct |
| | gttagagagataattagaattaatttgactgtaaacacaaagatattagtacaaaatacgtgacgtagaaagtaataatttcttgggtagtttgcagttttaaaatt |
| | atgttttaaaatggactatcatatgcttaccgtaacttgaaagtatttcgatttcttggctttatatatcttgtggaaaggacGTGAGTCGTGGCTTTA |
| | TGCCGTTAGGCGTTGCTCAACCCATGCCTTGCTCTCTTTCTGTCCTCAGTGGTCCGTGAGTCGT |
| | GGCTTTATGCCGTTAGGCGTTGCTCAATTTTTT (SEQ ID NO: 385) |
| pU6- | AATTCTGTGGAATGTGTGTCAGTTAGGGTGTGGAAAGTCCCCAGGCTCCCCAGCAGGCAGAA |
| IB20_CRISPR_ | GTATGCAAAGCATGCATCTCAATTAGTCAGCAACCAGGTGTGGAAAGTCCCCAGGCTCCCCA |
| ID113 | GCAGGCAGAAGTATGCAAAGCATGCATCTCAATTAGTCAGCAACCATAGTCCCGCCCCTAAC |
| | TCCGCCCATCCCGCCCCTAACTCCGCCCAGTTCCGCCCATTCTCCGCCCCATGGCTGACTAATT |
| | TTTTTTATTTATGCAGAGGCCGAGGCCGCCTCTGCCTCTGAGCTATTCCAGAAGTAGTGAGGA |
| | GGCTTTTTTGGAGGCCTAGGCTTTTGCAAAAAGCTAACTTGTTTATTGCAGCTTATAATGGTTA |
| | CAAATAAAGCAATAGCATCACAAATTTCACAAATAAAGCATTTTTTTCACTGCATTCTAGTTG |
| | TGGTTTGTCCAAACTCATCAATGTATCTTATCATGTCTGTATACCGTCGACCTCTAGCTAGAGC |
| | TTGGCGTAATCATGGTCATAGCTGTTTCCTGTGTGAAATTGTTATCCGCTCACAATTCCACACA |
| | ACATACGAGCCGGAAGCATAAAGTGTAAAGCCTGGGGTGCCTAATGAGTGAGCTAACTCACA |
| | TTAATTGCGTTGCGCTCACTGCCCGCTTTCCAGTCGGGAAACCTGTCGTGCCAGCTGCATTAA |
| | TGAATCGGCCAACGCGCGGGGAGAGGCGGTTTGCGTATTGGGCGCTCTTCCGCTTCCTCGCTC |
| | ACTGACTCGCTGCGCTCGGTCGTTCGGCTGCGGCGAGCGGTATCAGCTCACTCAAAGGCGGT |
| | AATACGGTTATCCACAGAATCAGGGGATAACGCAGGAAAGAACATGTGAGCAAAAGGCCAG |
| | CAAAAGGCCAGGAACCGTAAAAAGGCCGCGTTGCTGGCGTTTTTCCATAGGCTCCGCCCCCC |
| | TGACGAGCATCACAAAAATCGACGCTCAAGTCAGAGGTGGCGAAACCCGACAGGACTATAA |
| | AGATACCAGGCGTTTCCCCCTGGAAGCTCCCTCGTGCGCTCTCCTGTTCCGACCCTGCCGCTT |
| | ACCGGATACCTGTCCGCCTTTCTCCCTTCGGGAAGCGTGGCGCTTTCTCATAGCTCACGCTGT |
| | AGGTATCTCAGTTCGGTGTAGGTCGTTCGCTCCAAGCTGGGCTGTGTGCACGAACCCCCCGTT |
| | CAGCCCGACCGCTGCGCCTTATCCGGTAACTATCGTCTTGAGTCCAACCCGGTAAGACACGAC |
| | TTATCGCCACTGGCAGCAGCCACTGGTAACAGGATTAGCAGAGCGAGGTATGTAGGCGGTGC |
| | TACAGAGTTCTTGAAGTGGTGGCCTAACTACGGCTACACTAGAAGAACAGTATTTGGTATCTG |
| | CGCTCTGCTGAAGCCAGTTACCTTCGGAAAAAGAGTTGGTAGCTCTTGATCCGGCAAACAAA |
| | CCACCGCTGGTAGCGGTTTTTTTGTTTGCAAGCAGCAGATTACGCGCAGAAAAAAAGGATCTC |
| | AAGAAGATCCTTTGATCTTTTCTACGGGGTCTGACGCTCAGTGGAACGAAAACTCACGTTAAG |
| | GGATTTTGGTCATGAGATTATCAAAAAGGATCTTCACCTAGATCCTTTTAAATTAAAAATGAA |
| | GTTTTAAATCAATCTAAAGTATATATGAGTAAACTTGGTCTGACAGTTACCAATGCTTAATCA |
| | GTGAGGCACCTATCTCAGCGATCTGTCTATTTCGTTCATCCATAGTTGCCTGACTCCCCGTCGT |
| | GTAGATAACTACGATACGGGAGGGCTTACCATCTGGCCCCAGTGCTGCAATGATACCGCGAG |
| | ACCCACGCTCACCGGCTCCAGATTTATCAGCAATAAACCAGCCAGCCGGAAGGGCCGAGCGC |
| | AGAAGTGGTCCTGCAACTTTATCCGCCTCCATCCAGTCTATTAATTGTTGCCGGGAAGCTAGA |
| | GTAAGTAGTTCGCCAGTTAATAGTTTGCGCAACGTTGTTGCCATTGCTACAGGCATCGTGGTG |
| | TCACGCTCGTCGTTTGGTATGGCTTCATTCAGCTCCGGTTCCCAACGATCAAGGCGAGTTACA |
| | TGATCCCCCATGTTGTGCAAAAAAGCGGTTAGCTCCTTCGGTCCTCCGATCGTTGTCAGAAGT |
| | AAGTTGGCCGCAGTGTTATCACTCATGGTTATGGCAGCACTGCATAATTCTCTTACTGTCATG |
| | CCATCCGTAAGATGCTTTTCTGTGACTGGTGAGTACTCAACCAAGTCATTCTGAGAATAGTGT |
| | ATGCGGCGACCGAGTTGCTCTTGCCCGGCGTCAATACGGGATAATACCGCGCCACATAGCAG |
| | AACTTTAAAAGTGCTCATCATTGGAAAACGTTCTTCGGGGCGAAAACTCTCAAGGATCTTACC |
| | GCTGTTGAGATCCAGTTCGATGTAACCCACTCGTGCACCCAACTGATCTTCAGCATCTTTTACT |
| | TTCACCAGCGTTTCTGGGTGAGCAAAAACAGGAAGGCAAAATGCCGCAAAAAAGGGAATAA |
| | GGGCGACACGGAAATGTTGAATACTCATACTCTTCCTTTTTCAATATTATTGAAGCATTTATC |
| | AGGGTTATTGTCTCATGAGCGGATACATATTTGAATGTATTTAGAAAAATAAACAAATAGGG |
| | GTTCCGCGCACATTTCCCCGAAAAGTGCCACCTgagggcctatttcccatgattccttcatatttgcatatacgatacaaggct |
| | gttagagagataattagaattaatttgactgtaaacacaaagatattagtacaaaatacgtgacgtagaaagtaataatttcttgggtagtttgcagttttaaaatt |
| | atgttttaaaatggactatcatatgcttaccgtaacttgaaagtatttcgatttcttggctttatatatcttgtggaaaggacGTGAGTCGTGGCTTTA |
| | TGCCGTTAGGCGTTGCTCAATATATTCTGTTGATTTGGGGTGGAGAGTTCTGTAGGTGAGTCG |
| | TGGCTTTATGCCGTTAGGCGTTGCTCAATTTTTT (SEQ ID NO: 386) |
| pU6- | AATTCTGTGGAATGTGTGTCAGTTAGGGTGTGGAAAGTCCCCAGGCTCCCCAGCAGGCAGAA |
| IB20_CRISPR_ | GTATGCAAAGCATGCATCTCAATTAGTCAGCAACCAGGTGTGGAAAGTCCCCAGGCTCCCCA |
| ID114 | GCAGGCAGAAGTATGCAAAGCATGCATCTCAATTAGTCAGCAACCATAGTCCCGCCCCTAAC |
| | TCCGCCCATCCCGCCCCTAACTCCGCCCAGTTCCGCCCATTCTCCGCCCCATGGCTGACTAATT |
| | TTTTTTATTTATGCAGAGGCCGAGGCCGCCTCTGCCTCTGAGCTATTCCAGAAGTAGTGAGGA |
| | GGCTTTTTTGGAGGCCTAGGCTTTTGCAAAAAGCTAACTTGTTTATTGCAGCTTATAATGGTTA |
| | CAAATAAAGCAATAGCATCACAAATTTCACAAATAAAGCATTTTTTTCACTGCATTCTAGTTG |
| | TGGTTTGTCCAAACTCATCAATGTATCTTATCATGTCTGTATACCGTCGACCTCTAGCTAGAGC |
| | TTGGCGTAATCATGGTCATAGCTGTTTCCTGTGTGAAATTGTTATCCGCTCACAATTCCACACA |
| | ACATACGAGCCGGAAGCATAAAGTGTAAAGCCTGGGGTGCCTAATGAGTGAGCTAACTCACA |
| | TTAATTGCGTTGCGCTCACTGCCCGCTTTCCAGTCGGGAAACCTGTCGTGCCAGCTGCATTAA |
| | TGAATCGGCCAACGCGCGGGGAGAGGCGGTTTGCGTATTGGGCGCTCTTCCGCTTCCTCGCTC |
| | ACTGACTCGCTGCGCTCGGTCGTTCGGCTGCGGCGAGCGGTATCAGCTCACTCAAAGGCGGT |
| | AATACGGTTATCCACAGAATCAGGGGATAACGCAGGAAAGAACATGTGAGCAAAAGGCCAG |
| | CAAAAGGCCAGGAACCGTAAAAAGGCCGCGTTGCTGGCGTTTTTCCATAGGCTCCGCCCCCC |
| | TGACGAGCATCACAAAAATCGACGCTCAAGTCAGAGGTGGCGAAACCCGACAGGACTATAA |
| | AGATACCAGGCGTTTCCCCCTGGAAGCTCCCTCGTGCGCTCTCCTGTTCCGACCCTGCCGCTT |
| | ACCGGATACCTGTCCGCCTTTCTCCCTTCGGGAAGCGTGGCGCTTTCTCATAGCTCACGCTGT |
| | AGGTATCTCAGTTCGGTGTAGGTCGTTCGCTCCAAGCTGGGCTGTGTGCACGAACCCCCCGTT |
| | CAGCCCGACCGCTGCGCCTTATCCGGTAACTATCGTCTTGAGTCCAACCCGGTAAGACACGAC |
| | TTATCGCCACTGGCAGCAGCCACTGGTAACAGGATTAGCAGAGCGAGGTATGTAGGCGGTGC |
| | TACAGAGTTCTTGAAGTGGTGGCCTAACTACGGCTACACTAGAAGAACAGTATTTGGTATCTG |
| | CGCTCTGCTGAAGCCAGTTACCTTCGGAAAAAGAGTTGGTAGCTCTTGATCCGGCAAACAAA |
| | CCACCGCTGGTAGCGGTTTTTTTGTTTGCAAGCAGCAGATTACGCGCAGAAAAAAAGGATCTC |
| | AAGAAGATCCTTTGATCTTTTCTACGGGGTCTGACGCTCAGTGGAACGAAAACTCACGTTAAG |
| | GGATTTTGGTCATGAGATTATCAAAAAGGATCTTCACCTAGATCCTTTTAAATTAAAAATGAA |
| | GTTTTAAATCAATCTAAAGTATATATGAGTAAACTTGGTCTGACAGTTACCAATGCTTAATCA |
| | GTGAGGCACCTATCTCAGCGATCTGTCTATTTCGTTCATCCATAGTTGCCTGACTCCCCGTCGT |
| | GTAGATAACTACGATACGGGAGGGCTTACCATCTGGCCCCAGTGCTGCAATGATACCGCGAG |
| | ACCCACGCTCACCGGCTCCAGATTTATCAGCAATAAACCAGCCAGCCGGAAGGGCCGAGCGC |
| | AGAAGTGGTCCTGCAACTTTATCCGCCTCCATCCAGTCTATTAATTGTTGCCGGGAAGCTAGA |
| | GTAAGTAGTTCGCCAGTTAATAGTTTGCGCAACGTTGTTGCCATTGCTACAGGCATCGTGGTG |
| | TCACGCTCGTCGTTTGGTATGGCTTCATTCAGCTCCGGTTCCCAACGATCAAGGCGAGTTACA |
| | TGATCCCCCATGTTGTGCAAAAAAGCGGTTAGCTCCTTCGGTCCTCCGATCGTTGTCAGAAGT |
| | AAGTTGGCCGCAGTGTTATCACTCATGGTTATGGCAGCACTGCATAATTCTCTTACTGTCATG |
| | CCATCCGTAAGATGCTTTTCTGTGACTGGTGAGTACTCAACCAAGTCATTCTGAGAATAGTGT |
| | ATGCGGCGACCGAGTTGCTCTTGCCCGGCGTCAATACGGGATAATACCGCGCCACATAGCAG |
| | AACTTTAAAAGTGCTCATCATTGGAAAACGTTCTTCGGGGCGAAAACTCTCAAGGATCTTACC |
| | GCTGTTGAGATCCAGTTCGATGTAACCCACTCGTGCACCCAACTGATCTTCAGCATCTTTTACT |
| | TTCACCAGCGTTTCTGGGTGAGCAAAAACAGGAAGGCAAAATGCCGCAAAAAAGGGAATAA |
| | GGGCGACACGGAAATGTTGAATACTCATACTCTTCCTTTTTCAATATTATTGAAGCATTTATC |
| | AGGGTTATTGTCTCATGAGCGGATACATATTTGAATGTATTTAGAAAAATAAACAAATAGGG |
| | GTTCCGCGCACATTTCCCCGAAAAGTGCCACCTgagggcctatttcccatgattccttcatatttgcatatacgatacaaggct |
| | gttagagagataattagaattaatttgactgtaaacacaaagatattagtacaaaatacgtgacgtagaaagtaataatttcttgggtagtttgcagttttaaaatt |
| | atgttttaaaatggactatcatatgcttaccgtaacttgaaagtatttcgatttcttggctttatatatcttgtggaaaggacGTGAGTCGTGGCTTTA |
| | TGCCGTTAGGCGTTGCTCAATGGTCAATTTTGGAATAGGTGTGGTGTGGTGCTGAGTGAGTCG |
| | TGGCTTTATGCCGTTAGGCGTTGCTCAATTTTTT (SEQ ID NO: 387) |

TABLE 11

| Guide_ID | Locus | Spacer (35 bp, 5′ to 3′) |
|---|---|---|
| 3 | EMX1 | GGGAGGACATCGATGTCACC |
| | | TCCAATGACTAGGGT |
| | | (SEQ ID NO: 388) |
| 13 | DNMT1 | TTAACAGCTGACCCAATAAG |
| | | TGGCAGAGTGCTAAG |
| | | (SEQ ID NO: 389) |
| 16 | DNMT1 | GACCATCAGGAAACATTAAC |
| | | GTACTGATGTTAACA |
| | | (SEQ ID NO: 390) |
| 21 | DNMT1 | TTAAAAACACAACATCAGTG |
| | | CATGTTGGGGATTCC |
| | | (SEQ ID NO: 391) |
| 51 | SLC35A2 | CGGAAGGATCCCACAATCAC |
| | | TCTCAGAATGTTCTC |
| | | (SEQ ID NO: 392) |
| 52 | SLC35A2 | TGACTAGAGAGGGTCCATTT |
| | | TGAGGATGGGGGTGT |
| | | (SEQ ID NO: 393) |
| 73 | VEGFA | CCCATGCCTTGCTCTCTTTC |
| | | TGTCCTCAGTGGTCC |
| | | (SEQ ID NO: 394) |
| 113 | LINE1-ORF2 | TATATTCTGTTGATTTGGGG |
| | | TGGAGAGTTCTGTAG |
| | | (SEQ ID NO: 395) |
| 114 | LINE1-ORF2 | TGGTCAATTTTGGAATAGGT |
| | | GTGGTGTGGTGCTGA |
| | | (SEQ ID NO: 396) |

### Example 24—Dual Modes of CRISPR-Associated Transposon Homing

[0967] Tn7-like transposons have co-opted CRISPR systems, including class 1 Type I-F, I-B, and class 2 Type V-K. Intriguingly, although these CRISPR-associated transposases (CASTs) undergo robust CRISPR RNA (crRNA)-guided transposition, they are almost never found in sites targeted by the crRNAs encoded by the cognate CRISPR array. To understand this paradox, Applicants investigated CAST V-K and I-B systems and found two distinct modes of transposition: (1) crRNA-guided transposition and (2) CRISPR array-independent homing. Applicants show distinct CAST systems utilize different molecular mechanisms to target their homing site. Type V-K CAST systems use a short, delocalized crRNA for RNA-guided homing, whereas Type I-B CAST systems, which contain two distinct target selector proteins, use TniQ for RNA-guided DNA transposition and TnsD for homing to an attachment site. These observations illuminate a key step in the life cycle of CAST systems and highlight the diversity of molecular mechanisms mediating transposon homing.

### INTRODUCTION

[0968] CRISPR-Cas systems are adaptive immune systems employed by prokaryotes to defend against foreign genetic elements (Barrangou and Horvath, 2017; Marraffini, 2015; Mohanraju et al., 2016). CRISPR-Cas components have been associated with multiple roles beyond adaptive immunity (Faure et al., 2019a, 2019b), however, including guided transposition resulting from the co-option of inactivated Cas effector machinery by transposons (Faure et al., 2019a; Peters et al., 2017). Two distinct sub-types of CRISPR-associated transposon (CAST) systems have been experimentally characterized to date that facilitate RNA-guided targeting of Tn7-like transposons: V-K CAST systems, which utilize Cas12k effectors with naturally inactivated nuclease domains (Strecker et al., 2019), and I-F CAST systems, which utilize Cascade complexes lacking the Cas3 nuclease component (Klompe et al., 2019). In addition, type I-B CAST systems, which also contain components of the Cascade effector in association with Tn7-like transposons, but are extremely rare compared to other CAST systems, have been bioinformatically identified but not yet experimentally characterized (Faure et al., 2019a; Peters et al., 2017).

[0969] The prototypical Tn7 transposon from Escherichia coli mediates transposition using the core transposase proteins, TnsA, TnsB, and TnsC. These transposase proteins operate in two modes: (1) homing, where TnsABC interact with TnsD, a site-specific DNA-binding protein, to achieve transposition into the chromosomal glmS attachment site (also referred to as the homing site), or (2) mobile element transposition, where TnsABC interact with TnsE, a protein that preferentially directs the transposon to mobile elements including conjugative plasmids (Peters and Craig, 2001; Waddell and Craig, 1988, 1989). These two pathways allow the transposon to safely and efficiently travel from one host to another: after traveling through a mobile element, the TnsD pathway targets a site conserved across hosts to safely home to bacterial chromosomes. CAST systems, which lack tnsE, rely on spacers within their CRISPR arrays to achieve targeted transposition (Klompe et al., 2019; Strecker et al., 2019), likely to mobile genetic elements (Faure et al., 2019a, 2019b; Peters et al., 2017). The majority of identified CAST systems in bacterial chromosomes, however, are not located at targets programmed by their CRISPR array, but are rather found next to conserved sequences, including IMPDH and SRP RNA in the case of type I-F (Faure et al., 2019a; Peters et al., 2017), suggesting that CAST systems might have an innate homing site. This is also supported by the observation that all known CAST systems identified to date contain tniQ (a homolog of tnsD), and, in the case of type I-B, two tniQ genes. Here, Applicants investigate how CAST systems specifically transpose to bacterial chromosomes and identify homing in Type I-B systems involving protein-mediated homing, respectively.

### Type I-B Systems Use Two Distinct Target Selector Proteins for RNA-Guided Transposition and Homing

[0970] To investigate the generality of the RNA-guided homing mechanism to uncharacterized CAST subtypes, Applicants chose to further study the previously identified Type I-B CAST system (Faure et al. 2019a; Peters et al. 2017). Applicants searched for delocalized crRNAs in Type I-B loci, but Applicants could not detect any crRNAs, canonical or delocalized, that might enable homing. In contrast to type V-K and I-F CAST systems, Type I-B subtype 1 (hereafter I-B1) CAST systems uniquely encode two TniQ proteins (FIGS. 134A and 139A-139D), and it was previously suggested that one might function with the Cascade complex to provide RNA-guided targeting whereas the other might recognize an attachment site (Peters, 2019; Peters et al., 2017). These two TniQ proteins are more similar to prototypical Tn7 TnsD than those found in other CAST systems, suggesting that they likely evolved from a TnsD Tn7 ancestor (FIGS. 134B, 134C, 139B, and 139C). Although these TniQ proteins are distinct in their C-terminal region, the strong similarity of the longer TniQ to prototypical Tn7 TnsD and the conserved location of Type I-B1 CAST loci near glmS hint that the longer TniQ may facilitate DNA homing as a site-specific DNA-binding protein. Because of the strong similarity with Tn7 TnsD, Applicants named the longer TniQ as TnsD. Applicants therefore sought to investigate the functions of TnsD and TniQ and determine how I-B1 CAST systems achieve both RNA-guided and homing transposition, focusing on the I-B1 system from Anabaena variabilis (ATCC 29413, hereafter AvCAST).

[0971] Applicants cloned the nine AvCAST-related genes (tnsA, tnsB, tnsC, tniQ, cas6, cas8, cas7, cas5, and tnsD) into a helper plasmid (pHelper) under IPTG-inducible promoters (FIG. 135A; STAR Methods). Applicants cloned the predicted transposon right end (RE) and left end (LE) sequences (Peters et al., 2017) into a donor plasmid (pDonor) with a 0.5-kb cargo sequence. Two direct repeats from the AvCAST CRISPR array with appropriate spacers (i.e., the minimal CRISPR array) were further cloned into pHelper, and crRNA was expressed under an IPTG-inducible promoter. Small RNA sequencing revealed that transcripts from the minimal CRISPR array are processed into 72-nt mature crRNAs (FIG. 135B; Table S2 of Saito et. al, Cell 184, 1-13, Apr. 29, 2021, incorporated herein by reference).

[0972] Given that AvCAST likely requires a protospacer adjacent motif (PAM) to recognize target DNA, Applicants first targeted a plasmid (pTar-get) library containing AvPSP1 flanked by a 6N motif upstream of the protospacer (Strecker et al., 2019). To clarify the role of Av-CAST TniQ and TnsD in RNA-guided transposition, Applicants targeted AvPSP1 with pHelper variants lacking either tniQ or tnsD (FIG. 135A). Applicants detected PAM-RE-cargo-LE (PAM-RL) insertion into the target plasmid by PCR when using pHelpers containing tniQ, and furthermore, removal of tnsD from the system increased the efficiency of transposition (FIG. 135C). The other PAM-LE-cargo-RE (PAM-LR) direction insertions were confirmed by ddPCR (FIG. 135D), indicating that the insertion direction is strongly biased (PAM-RL:PAM-LR=54:1) in contrast to the Type I-F system from Vibrio cholerae (Klompe et al., 2019). Deep sequencing analysis of the DtnsD condition confirmed the insertion of the RE into pTarget and revealed a preference for 50 AT PAMs (FIG. 135E). Applicants next examined the position of the donor in pInsert products relative to AvPSP1, and Applicants detected insertions mainly within an 80- to 86-bp window downstream of the PAM (43-49 bp downstream of the spacer) (FIG. 135E). To investigate the exact structure of the pInsert, Applicants performed long read, ampli-fication-free nanopore sequencing. Applicants found only simple inser-tions generated by type I-B1 AvCAST, whereas type V-K systems showed ˜20% cointegrate insertions in this experimental context (FIG. 135F, (Strecker et al. 2020)). Applicants also confirmed the existence of target site duplications by Sanger sequencing of individual pInserts (FIG. 135G). These results show AvCAST can perform RNA-guided transposition, and tniQ is necessary and sufficient for this activity.

[0973] To test whether AvCAST can target bacterial genomic DNA, Applicants picked 36 PAM-containing targets (labeled AvPSP2-37) in E. coli. Two separate helper plasmids, pCascade (bearing cas6, cas8, cas7, cas5, and the minimal CRISPR array) and pTns (bearing tnsA, tnsB, tnsC, tniQ, and tnsD) were co-electroporated into E. coli with pDonor. Although clear PCR amplicons were detected on the gel at only 10 out of the 36 sites (27.8%) (FIG. 140A), 25 sites showed distinguishable signals compared to the no guide control condition by ddPCR (FIG. 135B). Further confirmation by deep sequencing revealed that 33 sites showed insertions 70-100 bp downstream of the PAM (33-63 bp downstream of the spacer), as Applicants observed prominent peaks in a 80- to 86-bp window downstream of the PAM (43-49 bp downstream of the spacer) in AvPSP1 targeting (FIG. 135C). These results suggest that over 90% of guides are functional, with insertion frequencies between 0.02% and 2.45%. For three representative genomic sites (AvPSP2, AvPSP7, and AvPSP12), Applicants performed tagmentation-based tag integration site sequencing (TTISS) (Schmid-Burgk et al., 2020) to determine the specificity of genome targeting by AvCAST. Applicants observed comparable insertion efficiency with newly constructed heat-sensitive pSC101-donor and pDonor (FIG. 140D), and confirmed that 98.8%, 99.8%, and 89.2% of the total insertion reads map to each expected target site (AvPSP2, AvPSP7, and AvPSP12, respectively) by TTISS (FIG. 140E). This indicates that AvCAST can be reprogrammed to precisely insert DNA at specific sites in the E. coli genome.

[0974] Given that tnsD is dispensable for RNA-guided transposition, Applicants tested the hypothesis that tnsD can mediate homing to the host glmS Tn7 attachment site (attTn7) (Waddell and Craig, 1989). The native AvCAST contig (CP000117) and two other identical contigs (100% of sequence identity at the nucleotide level) show insertion 5 bp downstream of glmS gene stop codon, whereas all other homologous loci from diverse contigs (non-identical) are constantly inserted ˜25 bp downstream of the end of glmS (FIG. 141A). To examine whether AvCAST tnsD mediates homing to the A. variabilis glmS gene (A.v. glmS), Applicants generated pTarget(AvCAST) containing the A.v. glmS sequence and AvPSP1 flanked by an AT PAM, which Applicants used to assess the transposition efficiency. As Applicants observed for PAM library plasmid targeting, removal of tnsD from the system increased insertion frequency at the AvPSP1 site, as quantified by ddPCR (3.0-fold) (FIG. 136A). In contrast to RNA-guided transposition, tniQ is not necessary for Tn7-like transposition to the glmS site. Moreover, removal of tniQ from the system increased insertion frequency at the site (16.8-fold) (FIG. 136B). Applicants found that the prominent insertion site is 24 bp downstream of A.v. glmS gene (FIG. 136C), which, although different from the native locus, is similar to other homologous loci. This insertion site was not affected by co-expression of Cascade and TniQ (FIG. 136C). Applicants then cloned the downstream region of glmS from the native contig into pTarget and repeated the transposition assays to determine if there are additional elements that govern insertion sites. Applicants again observed a prominent insertion site at the canon-ical Tn7 insertion site, 25 bp downstream of glmS (FIG. 136C), suggesting there are no additional elements. It is possible the locus found 5 bp downstream glmS in the native contig (CP000117) could result from a 20-bp microdeletion, an idea supported by the lack of target site duplications in this contig.

[0975] To obtain additional evidence that this homing transposition is mediated by Tn7-like machinery, Applicants focused on the similarity between A. variabilis and E. coli glmS genes and assessed trans-position into target plasmids harboring glmS mutations. As expected from the similarity, Applicants observed an insertion 24 bp downstream of the E. coli glmS gene (FIG. 141B). Similarly, expression of all Tn7-like machinery proteins with or without the Cascade complex induced transposition 25 bp downstream of glmS in the E. coli genome with target site duplications (TSDs) (FIG. 141C-141E). Based on previous findings about E. coli glmS attTn7 (Mitra et al., 2010), Applicants introduced single point mutations at 6 positions previously reported to be important for TnsD attachment and that are conserved between A. variabilis and E. coli glmS. Applicants also constructed an additional 3 variants, two with double mutants and one with all six conserved sites mutated. Each of the six single point mutations in the A.v. glmS gene significantly impaired transposition, and both the double point mutants and the sextuple mutant completely abolished it (FIG. 136D), suggesting that this homing transposition is achieved through recognition of attTn7 by AvCAST TnsD.

[0976] To further validate these observations, Applicants reconstituted Tn7-like transposition of AvCAST in vitro (Bainton et al., 1991) (FIG. 136E). As expected, four Tn7 components (insA, tnsB, tnsC, and tnsD) (FIG. 141F) and pDonor resulted in the transposition into a pTarget vector bearing the E. coli glmS Tn7 attachment site (FIGS. 136F and 136G).

### A Distinct CAST I-B System Homes to Non-Coding RNA Sites

[0977] Applicants sought to investigate the generalizability of this homing mechanism by considering a second subtype of CAST I-B systems, subtype 2 (hereafter I-B2). In contrast to Type I-B1, Type I-B2 systems are not found at glmS in their native hosts, but are instead found next to tRNA genes (e.g., tRNA-Val and -Ala) (FIGS. 134A and 139C), similar to type V-K CAST systems. Although Type I-B1 and I-B2 share similar Cascade proteins (38% sequence identity, estimated from the concatenation of all Cas protein sequences), their transposon proteins have less than 10% sequence identity (concatenation of all Tn7 protein components). Moreover, although Type I-B2 systems contain a TnsC protein and two TniQ proteins (FIG. 139C), similar to I-B1 systems, they also harbor a fusion protein of TnsA and TnsB (hereafter TnsAB). Together, these findings suggest Cascade I-B was likely captured by two different transposons in evolutionarily independent events. Given these differences, Applicants sought to determine the mechanisms used by these distinct systems. Among the putative I-B2 CAST systems, Applicants focused on one from Peltigera membranacea cyanobiont 210A (PmcCAST) (FIG. 134A) to investigate how it homes to tRNA genes. The PmcCAST locus encodes two TniQ proteins, with the larger TniQ protein having a weak but detectable similarity to Tn7 TnsD in its C-terminal region (HHpred probability is 99.26% with a sequence identity of 14%), indicating this protein (hereafter called TnsD) might be the homing selector target protein.

[0978] Applicants cloned the eight PmcCAST genes (tnsAB, tnsC, tniQ, tnsD, cas6, cas8, cas7, and cas5) into a pHelper plasmid with a mini-mal CRISPR array. Predicted RE and LE sequences with 0.5-kb cargo were further cloned into pDonor. As described above, Applicants targeted a PmcPSP1-containing 6N PAM library vector to concurrently identify the preferred PAM and insertion position of PmcCAST. Applicants confirmed the expression of a 71-nt mature crRNA by RNA sequencing (FIG. 142A; Table S2 of Saito et. al, Cell 184, 1-13, Apr. 29, 2021, incorporated herein by reference). Analysis of PmcCAST pInsert plasmids revealed single direction-biased insertions (PAM-RL:PAM-LR=1:630) within an 83- to 92-bp window downstream of a strong ATG PAM (48-57 bp downstream of spacer) (FIGS. 137A, 142B, and 142C). In contrast to type I-B1 AvCAST, Applicants found cointegrate insertions by this type I-B2 PmcCAST, whose cointegrate ratio (17%) is comparable to that of type V-K ShCAST (20%) (Strecker et al. 2020) (FIG. 137B). Applicants also confirmed the existence of target site duplications of in-dividual pInserts (FIG. 142D).

[0979] To examine the role of TniQ and TnsD in PmcCAST RNA-guided transposition and homing, Applicants generated pTarget(PmcCAST) containing the host tRNA-Val gene and PmcPSP1 flanked by an ATG PAM. Applicants targeted PmcPSP1 with pHelper and its variants lacking either tniQ or tnsD (FIG. 137C). As with AvCAST, Applicants again found that removal of tnsD from the system increased insertion frequency at the PmcPSP1 site, as quantified by ddPCR (14.5-fold) (FIG. 137D). Expression of just the Tns proteins by pTns (bearing tnsAB, insC, tniQ, and insD) also induced transposition on pTarget(PmcCAST), and deep sequencing analysis revealed that the prominent insertion site is 31 bp down-stream of the tRNA-Val gene, consistent with where PmcCAST is located in the genome (FIGS. 137E and 137F). For this Tn7-like transposition of PmcCAST to the tRNA-Val homing site, TnsD is essential whereas TniQ is not necessary (FIG. 137F). Reconstitution of Tn7-like transposition of PmcCAST in vitro (FIG. 142E) validated that three protein components (TnsAB, TnsC, and TnsD) and pDonor resulted in the transposition into pTarget(PmcCAST) (FIGS. 137G and 137H). Thus, although the homing site is different, Type I-B2 achieves RNA-guided transposition through the same mechanism used by Type I-B1. The detection of high levels of cointegrate pInsert plasmids suggests that the TnsAB fusion of PmcCAST does not have the ability to process the 50 ends of the transposon, instead facilitating copy-and-paste transposition into the target site.

### DISCUSSION

[0980] The non-random occurrence of CAST insertions within bacterial genomes hints at mechanisms for directing transposition into conserved chromosomal sequences, or homing sites (FIG. 138A). Here, Applicants uncover two distinct ways by which CAST systems accomplish this task: V-K systems home using a dedicated de-localized crRNA, primarily to tRNA targets, whereas I-B systems utilize a dedicated tniQ tnsD that mediates homing to glmS via direct DNA motif recognition in subtype 1 (similar to the prototypical Tn7) or to various tRNA genes in subtype 2 (FIG. 138B). The use of an atypical crRNA expressed from outside of the CRISPR array in type V-K systems reveals remarkable similarity to type I-F CAST systems, which were discovered to also use a non-canonical crRNA to target homing sites (Petassi et al., 2020). This non-canonical crRNA features a variable repeat that is still able to form a hairpin for Cascade recognition and a full length or truncated spacer that can target homing sites despite numerous mismatches with the target. The similarities in these diverse CAST systems highlights the importance of transposon homing, and that in multiple instances, evolution has selected for an RNA-guided solution (FIG. 143). These likely ancient homing spacers have been shaped by evolution from their respective effectors, and shed light on a remarkable ability for target recognition.

[0981] The preference for homing to conserved genes and the ability to insert downstream of the target sequence (e.g., tRNA and glmS) allows CAST systems to safely target numerous bacterial species without being deleterious to the host. The use of Cas protein-mediated RNA-guided targeting (that is known to tolerate a small number of mismatches between the RNA guide and its DNA target) of homing sites likely provides some flexibility to recognize variation across bacterial species. The similarity of CAST I-B1 homing to prototypical Tn7 suggests a close evolutionary relationship and reveals a distinct strategy to integrate safely into chromosomes. The finding that two separate subtypes of I-B use the same homing mechanism, but target different sites, further supports the notion that Type I CRISPR-Cas systems were independently acquired by two distinct Tn7-like transposons.

[0982] The results address a critical gap in the understanding of CAST systems, namely, why they are found at sites not targeted by their CRISPR arrays. Applicants find that while some systems use an RNA-guided homing mechanism, others use a protein-targeted mechanism likely inherited from the transposon. Either one of these mechanisms allows CAST systems to insert themselves into host genomes by targeting well-conserved bacterial genes that serve as safe harbor attachment sites (FIG. 138B). Thus, CAST systems seem to utilize two modes of insertion: transposition to mobile elements using RNA-guided targeting and homing using either RNA-guided targeting or the tniQ tnsD pathway, like Tn7 transposons. Type I-F conserved transcription factors are linked to the switch between pathways (Petassi et al., 2020), and consistent with this observation, Applicants can detect conserved transcription factors within CAST V-K and CAST I-B loci (FIG. 138A) that appear to be distinct from cargo genes and could be linked to transposon pathway switching. Further analysis remains to be done to confirm they are pathway regulators. Applicants also note the inability to detect expression of the homing crRNA in the cyanobacteria host S. hofmannii hinting at potential regulation. In addition to elucidating homing mechanisms, the work here experimentally characterizes the Type I-B CAST systems and demonstrates that both subtypes of I-B CAST systems can transpose via RNA-guided targeting. Importantly, these Type I-B CAST systems provide new starting points for developing genome engineering tools for targeted gene insertion in bacterial genomes (Strecker et al. 2019; Klompe et al. 2019; Rubin et al., 2020; Vo et al., 2020) and potential applications in human cells. Collectively, this work advances the understanding of the biology of these systems, highlighting conserved and divergent features, and shedding light on their mechanisms of action.

### References Related to Example 24

[0983] Altschul, S. F., Gish, W., Miller, W., Myers, E. W., and Lipman, D. J. (1990). Basic local alignment search tool. J. Mol. Biol. 215, 403-410.
[0984] Bainton, R., Gamas, P., and Craig, N. L. (1991). Tn7 transposition in vitro pro-ceeds through an excised transposon intermediate generated by staggered breaks in DNA. Cell 65, 805-816.
[0985] Barrangou, R., and Horvath, P. (2017). A decade of discovery: CRISPR func-tions and applications. Nat. Microbiol. 2, 17092.
[0986] Callebaut, I., Labesse, G., Durand, P., Poupon, A., Canard, L., Chomilier, J., Henrissat, B., and Mornon, J. P. (1997). Deciphering protein sequence informa-tion through hydrophobic cluster analysis (HCA): current status and perspec-tives. Cell. Mol. Life Sci. 53, 621-645.
[0987] Chan, P. P., and Lowe, T. M. (2019). tRNAscan-SE: Searching for tRNA Genes in Genomic Sequences. Methods Mol. Biol. 1962, 1-14. Eddy, S. R. (2009). A new generation of homology search tools based on prob-abilistic inference. Genome Inform 23, 205-211.
[0988] Faure, G., and Callebaut, I. (2013a). Comprehensive repertoire of foldable re-gions within whole genomes. PLoS Comput. Biol. 9, e1003280. Faure, G., and Callebaut, I. (2013b). Identification of hidden relationships from the coupling of hydrophobic cluster analysis and domain architecture informa-tion. Bioinformatics 29, 1726-1733.
[0989] Faure, G., Shmakov, S. A., Yan, W. X., Cheng, D. R., Scott, D. A., Peters, J. E., Makarova, K. S., and Koonin, E. V. (2019a). CRISPR-Cas in mobile genetic ele-ments: counter-defence and beyond. Nat. Rev. Microbiol. 17, 513-525. Faure, G., Makarova, K. S., and Koonin, E. V. (2019b). CRISPR-Cas: Complex Functional Networks and Multiple Roles beyond Adaptive Immunity. J. Mol. Biol. 431, 3-20.
[0990] Griffiths-Jones, S., Bateman, A., Marshall, M., Khanna, A., and Eddy, S. R. (2003). Rfam: an RNA family database. Nucleic Acids Res. 31, 439-441. Halpin-Healy, T. S., Klompe, S. E., Sternberg, S. H., and Ferna ndez, I. S. (2020). Structural basis of DNA targeting by a transposon-encoded CRISPR-Cas sys-tem. Nature 577, 271-274.
[0991] Hyatt, D., Chen, G.-L., Locascio, P. F., Land, M. L., Larimer, F. W., and Hauser, L. J. (2010). Prodigal: prokaryotic gene recognition and translation initiation site identification. BMC Bioinformatics 11, 119. Petassi, M. T., Hsieh, S.-C., and Peters, J. E. (2020). Guide RNA categorization enables target site choice in Tn7-CRISPR-Cas transposons. Cell 183, 1757-1771.
[0992] Vo, P. L. H., Ronda, C., Klompe, S. E., Chen, E. E., Acree, C., Wang, H. H., and Sternberg, S. H. (2020). CRISPR RNA-guided integrases for high-efficiency and multiplexed bacterial genome engineering. Nat. Biotechnol. Published on-line Nov. 23, 2020. https://doi.org/10.1038/s41587-020-00745-y. Katoh, K., Kuma, K., Toh, H., and Miyata, T. (2005). MAFFT version 5: improve-ment in accuracy of multiple sequence alignment. Nucleic Acids Res. 33, 511-518.
[0993] Kearse, M., Moir, R., Wilson, A., Stones-Havas, S., Cheung, M., Sturrock, S., Buxton, S., Cooper, A., Markowitz, S., Duran, C., et al. (2012). Geneious Basic: an integrated and extendable desktop software platform for the organization and analysis of sequence data. Bioinformatics 28, 1647-1649.
[0994] Keegan, K. P., Glass, E. M., and Meyer, F. (2016). MG-RAST, a Metagenomics Service for Analysis of Microbial Community Structure and Function. Methods Mol. Biol. 1399, 207-233. Klompe, S. E., Vo, P. L. H., Halpin-Healy, T. S., and Sternberg, S. H. (2019). Transposon-encoded CRISPR-Cas systems direct RNA-guided DNA integra-tion. Nature 571, 219-225.
[0995] Letunic, I., and Bork, P. (2007). Interactive Tree Of Life (iTOL): an online tool for phylogenetic tree display and annotation. Bioinformatics 23, 127-128.
[0996] Makarova, K. S., Wolf, Y. I., Iranzo, J., Shmakov, S. A., Alkhnbashi, O. S., Brouns, S. J. J., Charpentier, E., Cheng, D., Haft, D. H., Horvath, P., et al. (2020). Evolutionary classification of CRISPR-Cas systems: a burst of class 2 and derived variants. Nat. Rev. Microbiol. 18, 67-83.
[0997] Marraffini, L. A. (2015). CRISPR-Cas immunity in prokaryotes. Nature 526, 55-61. Mitra, R., McKenzie, G. J., Yi, L., Lee, C. A., and Craig, N. L. (2010). Character-ization of the TnsD-attTn7 complex that promotes site-specific insertion of Tn7. Mob. DNA 1, 18.
[0998] Mohanraju, P., Makarova, K. S., Zetsche, B., Zhang, F., Koonin, E. V., and van der Oost, J. (2016). Diverse evolutionary roots and mechanistic variations of the CRISPR-Cas systems. Science 353, aad5147. Nawrocki, E. P., and Eddy, S. R. (2013). Infernal 1.1: 100-fold faster RNA homol-ogy searches. Bioinformatics 29, 2933-2935.
[0999] Peters, J. E. (2019). Targeted transposition with Tn7 elements: safe sites, mo-bile plasmids, CRISPR/Cas and beyond. Mol. Microbiol. 112, 1635-1644. Peters, J. E., and Craig, N. L. (2001). Tn7 recognizes transposition target struc-tures associated with DNA replication using the DNA-binding protein TnsE. Genes Dev. 15, 737-747.
[1000] Peters, J. E., Makarova, K. S., Shmakov, S., and Koonin, E. V. (2017). Recruit-ment of CRISPR-Cas systems by Tn7-like transposons. Proc. Natl. Acad. Sci. USA 114, E7358-E7366.
[1001] Price, M. N., Dehal, P. S., and Arkin, A. P. (2009). FastTree: computing large minimum evolution trees with profiles instead of a distance matrix. Mol. Biol. Evol. 26, 1641-1650.
[1002] Rubin, B. E., Diamond, S., Cress, B. F., Crits-Christoph, A., He, C., Xu, M., Zhou, Z., Smock, D. C., Tang, K., Owens, T. K., et al. (2020). Targeted Genome Editing of Bacteria Within Microbial Communities. bioRxiv. https://doi.org/10. 1101/2019.12.11.123456v2.
[1003] Schmid-Burgk, J. L., Gao, L., Li, D., Gardner, Z., Strecker, J., Lash, B., and Zhang, F. (2020). Highly Parallel Profiling of Cas9 Variant Specificity. Mol. Cell 78, 794-800.e8. Steinegger, M., and So″ding, J. (2017). MMseqs2 enables sensitive protein sequence searching for the analysis of massive data sets. Nat. Biotechnol. 35, 1026-1028.
[1004] Strecker, J., Ladha, A., Gardner, Z., Schmid-Burgk, J. L., Makarova, K. S., Koo-nin, E. V., and Zhang, F. (2019). RNA-guided DNA insertion with CRISPR-asso-ciated transposases. Science 365, 48-53. Strecker, J., Ladha, A., Makarova, K. S., Koonin, E. V., and Zhang, F. (2020). Response to Comment on “RNA-guided DNA insertion with CRISPR-associ-ated transposases”. Science 368, eabb2920.
[1005] Waddell, C. S., and Craig, N. L. (1988). Tn7 transposition: two transposition pathways directed by five Tn7-encoded genes. Genes Dev. 2, 137-149. Waddell, C. S., and Craig, N. L. (1989). Tn7 transposition: recognition of the attTn7 target sequence. Proc. Natl. Acad. Sci. USA 86, 3958-3962.

### Methods

[1006] Reagents and resources used in the methods are further detailed in the STAR Methods Key Resources Table of Saito et al., Cell (2021), doi:10.1016/j.cell.2021.03.006, incorporated specifically herein by reference.

[1007] For transposition assays, E. coli strains were plated on LB-agar plates supplemented with appropriate antibiotics and IPTG and incubated at 37° C. for 17 hours. For recovery of mature crRNAs and Tns proteins of I-B CAST systems, E. coli from a single colony were grown in Terrific Broth media (TB) at 37° C. until OD600 reached 0.6, and further grown at 16° C. with IPTG supplementation for expression. Culture for Trichormus variabilis followed the condition suggested by ATCC. Scytonema hofmanni (UTEX B 2349) and Anabaena cylindrica (PCC 7122) were cultured in BG-11 media at 25° C. with light periodicity of 14 hours on, 10 hours off.

[1008] All plasmids used in this study are described in Table S2 of Saito et. al, Cell 184, 1-13, Apr. 29, 2021, incorporated herein by reference. For ShCAST homing analysis, a tRNA target plasmid was cloned in the pACYC background by rejoining the chromosomal sequence up and downstream of the transposon. ShCAST pHelper plasmids (Addgene #127922) with endogenously driven tracrRNA were modified by replacing the previous FnPSP1 spacer with various crRNA driven by the J23117 promoter and flanked with the T7Te terminator using Gibson Assembly (NEB). The 24-nt 50 extension and 14-nt 30 extensions of the delocalized crRNA were taken from the natural host to match the length of crRNA derived from the CRISPR array. For sgRNA experiments targeting the E. coli genome, the pHelper_ShCAST_sgRNA plasmid (Addgene #127922) was modified by cloning spacers using Golden Gate assembly and LguI. For all RNA truncations, the length of crRNA or sgRNA spacer was reduced, and mismatches were generated with transversion mutations (A to T, T to A, G to C, C to G). All tested crRNA and sgRNA can be found in Table S2 of Saito et. al, Cell 184, 1-13, Apr. 29, 2021, incorporated herein by reference. For AvCAST experiments, genes encoding TnsA-TnsB-TnsC-TniQ, TnsD and Cas6-Cas8-Cas7-Cas5 were amplified from the genome of Trichormus variabilis (Anabaena variabilis ATCC 29413). All the Tns genes were cloned into pCOLADuet-1 (Milli-pore) and the Cascade genes were cloned into pCDFDuet-1 (Millipore), resulting in pTns(AvCAST) and pCascade(AvCAST)_DCRISPR, respectively using Gibson Assembly Master Mix (NEB). A pCascade was generated by inserting a tandem BsaI site flanked by two CRISPR direct repeats into pCascade(AvCAST)_DCRISPR, and specific guides were further inserted by BsaI digestion and ligation. The Tns expression cassette in pTns(AvCAST) was inserted into pCascade(AvCAST) to obtain pHelper(AvCAST). For PmcCAST experiments, genes encoding ‘Peltigera membranacea cyanobiont’ 210A TnsAB-TnsC-TnsD, TniQ, and Cas6-Cas8-Cas7-Cas5 were synthesized (Twist Bioscience) and cloned into pCDFDuet-1 with the appropriate spacer flanked by two CRISPR direct repeats described above. Gene fragments encoding both transposon ends (GENEWIZ) were cloned into pBluescript II SK (+), yielding pDonor(AvCAST) or pDonor(PmcCAST). For PAM screens, a 0.5 kb exon fragment amplified from human EMX1 was inserted between the transposon ends as a mock non-functional cargo in E. coli. For other experiments, a chloramphenicol resistance gene (CmR) was used as cargo. To obtain pTns variants, the Q5 Site-Directed Mutagenesis Kit (NEB) was used. For Nanopore sequencing experiments, all CAST components (DR-spacer-DR, Cascade, and Tns proteins) were cloned under a constitutive lac promoter to obtain pHelper2(AvCAST) and pHelper2(PmcCAST). The design of pR6K donors for AvCAST and PmcCAST followed that of pDonor_ShCAST_kanR (Addgene #127924). The glmS locus of BL21(DE3) (3800227-3801226, CP001509) was cloned into pUC19 (NEB). The glmS gene of A. variabilis and tRNA-Val gene of ‘Peltigera membranacea cyanobiont’ 210A were cloned into pA-CYC vector bearing AvPSP1 or PmcPSP1 flanked by an AT or ATG PAM, respectively. These target plasmids were used as pTarget for in vitro transposition assays and also pTarget for assays in bacteria.

[1009] To identify the PAM of AvCAST and PmcCAST, 100 ng of randomized 6N sequence-containing pACYC vector libraries (Strecker et al., 2019) was co-electroporated with 100 ng of both pHelper and pDonor into BL21(DE3) electrocompetent cells (Sigma). Cells were recovered for 1 hour and plated on 100 mg/ml carbenicillin, 50 mg/ml spectinomycin, and 50 mg/ml chloramphenicol containing LB-agar plates. After 37° C. incubation for 17 hours, all colonies were scraped from the plates, and a portion was re-plated on 0.1 mM IPTG supplemented triple antibiotic LB-agar plates to induce protein expression. Cells were incubated for an additional 17 hours at 37° C. All colonies were scraped and plasmid DNAs were prepared from the colonies using the PureYield Plasmid Midiprep System (Promega). Insertion products containing the 6N sequence were amplified and sequenced using a MiSeq Reagent Kit v2, 300-cycle (Illumina). PAM and insert position were characterized using an established pipeline (Strecker et al., 2019).

[1010] For ShCAST, transposition in E. coli was performed by transformation of 20 ng each of pHelper, pTarget, and pDonor into Transfor-Max EC100 pir+Electrocompetent E. coli (Lucigen). Cells were recovered for 1 hour and plated on ampicillin, kanamycin, and chlor-amphenicol-containing plates. Cells were harvested 20 hours after plating, and scraped cells were lysed in 15 uL colony lysis buffer (TE with 0.1% Triton X-100). Genome targeting experiments were performed in a similar manner using pHelper and pDonor plasmids followed by plating on ampicillin and kanamycin. Cells were boiled for 5 min, diluted with 60 uL of water, spun at 4000×g for 10 min to pellet debris, and the supernatant was used for subsequent analysis. The frequency of genome insertions relative to the concentration of extracted E. coli genomes or to the target plasmid was determined with qPCR as described above with a guide-specific for-ward primer and a primer/probe set in an unmodified region of the E. co/i genome or the pTarget chloramphenicol resistance gene (Table S2 of Saito et. al, Cell 184, 1-13, Apr. 29, 2021, incorporated herein by reference). The initial homing test for ShCAST was performed with a modified pHelper plasmid harboring a deletion of cas12k.

[1011] For AvCAST, 10 guides with 50 AT PAMs were chosen in non-coding regions of the E. coli genome (Strecker et al., 2019) and cloned into pCascade(AvCAST) (Table S2 of Saito et. al, Cell 184, 1-13, Apr. 29, 2021, incorporated herein by reference). Each 100 ng of pCascade(AvCAST) targeting a specific genomic region was co-electroporated with pTns(AvCAST)_DTnsD and pDonor(AvCAST) into BL21(DE3) electrocompetent cells (Sigma) and plated on 100 mg/ml carbenicillin, 50 mg/ml spectinomycin, and 50 mg/ml kanamycin containing LB-agar plates. After 37° C. incubation for 17 hours, all colonies were scraped from the plates, and a portion was re-plated on 0.1 mM IPTG supplemented triple antibiotic LB-agar plates to induce protein expression. Cells were incubated for an additional 17 hours at 37° C. All colonies were scraped and the gDNA was purified using the Wizard Genomic DNA Purification Kit (Promega). Insertions were identified by PCR using KAPA HiFi HotStart ReadyMix (Roche). The frequency of genome insertions was determined with droplet digital PCR (ddPCR) as described below with 20 ng template gDNA for 20 mL ddPCR reaction.

[1012] Transposition assays for AvCAST and PmcCAST were performed by transformation of 30 ng each of pHelper2, pR6K Donor, and pTarget(AT/ATG+AvPSP1/PmcPSP1) into Pirl E. co/i. Cells were recovered for 1 hour at 37° C. and plated on 50 mg/ml kanamycin, 50 mg/ml spectinomycin, and 50 mg/ml chloramphenicol containing LB-agar plates. Cells were harvested 5 days after incubation at room temperature, and subjected to mini-prep by QIAprep Spin Miniprep Kit (QIAGEN). Note that Applicants avoided incubation at 37° C. to prevent transposed products being actively resolved, which would mask replicative transposition. To recover transposed products, 100 ng mini-prep product was electroporated into Endura Competent Cells (Lucigen). Cells were recovered for 1 hour and plated on 50 mg/ml kanamycin and 50 mg/ml chloramphenicol containing LB-agar plates, and further incubated at room temperature for 5 days. Donor insertion on pTarget was confirmed by Sanger sequencing (position and target site duplication) of mini-prep products for 12 colonies. In parallel, all colonies were harvested and subjected to mini-prep, followed by amplification-free Nanopore sequencing library preparation (Oxford Nanopore Technologies SQK-LSK109). Briefly, mini-prep products were linearized by EcoRV, followed by end-prep and subsequent ligation of sequencing adapters. Resulting libraries were loaded on a MinION R9 flow cell and sequenced. Sequence reads containing 20 bp of AvPSP1/PmcPSP1 and both 20 bp of the outer transposon LE and RE were filtered for further analysis, thereby discarding short, low-quality, and contaminating gDNA reads.

[1013] Insertion events were quantified using insertion specific primers and a donor specific probe (see Table S2 of Saito et. al, Cell 184, 1-13, Apr. 29, 2021, incorporated herein by reference). ddPCR Supermix for Probes (No dUTP) (BioRad), primers (900 nM each), a probe (250 nM), and template DNA were combined into 20 mL reactions, and droplets were generated with 70 mL of Droplet Generation Oil for Probes (BioRad) using the QX200 Droplet Generator (BioRad). Thermal cycling conditions for ddPCR reactions were as follows: 1 cycle, 95° C., 10 min; 40 cycles, 94° C., 30 s, 58° C., 1 min; 1 cycle, 98° C., 10 mins; 4° C. hold. PCR products were read with a QX200 Droplet Reader, and absolute concentrations of inserts were determined using QuantaSoft (v1.6.6.0320). Total template (genome or target plasmid) amount was also quantified through this process, and insertion frequency was calculated as inserts/template.

[1014] AvPSP2, 7, and 12 sites on the E. coli genome were targeted as mentioned above, with the following change: 100 ng of a temperature-sensitive pSC101-donor was used. After incubation on IPTG supplemented triple antibiotic LB-agar plates, cells were re-plated and grown for 12 hours at 43° C. to prevent unintended amplification of donor plasmids in the following Tagmentation-based Tag Integration Site Sequencing (TTISS) analysis (Schmid-Burgk et al., 2020). Genomic DNA was extracted from hundreds of colonies on a LB-agar Petri dish, and 500 ng genomic DNA (from approximate 108 E. coli cells) was tagmented with Tn5, and re-purified by Wizard SV Gel and PCR Clean-Up System (Promega). Tagmented DNA samples were amplified using two rounds of PCR with KOD Hot Start DNA Polymerase (Millipore) using a Tn5 adaptor-specific primer and nested primers within the DNA donor (see Table S2 of Saito et. al, Cell 184, 1-13, Apr. 29, 2021). The resulting libraries were sequenced using a NextSeq v2 kit, 75 cycle kit with 45 forward cycles and 30 reverse cycles. Read pairs with R1 containing the terminal 27 bp of the transposon RE sequence were filtered for further analysis and trimmed of the transposon sequence for alignment to the E. coli genome (CP001509). Filtered and trimmed reads were imported into Geneious Prime and aligned using the Geneious aligner with medium-low sensitivity, no fine-tuning, no structural variant, insertion, or deletion discovery enabled, and requiring paired reads to map nearby. The resulting SAM files were exported for further analysis. Aligned R1 reads with length of 18 bp (remaining R1 length after trimming of 27 bp of transposon sequence) and SAM flags 99 (insertion position=POS field) or 147 (insertion position=POS field+trimmed R1 length of 18 bp) were used to determine the transposon insertion position. Reads with an insertion position 50-100-bp downstream of the PAM were considered on-target, whereas remaining reads were counted as off-targets.

[1015] Quantitative PCR reactions were performed using TaqMan Fast Advanced Master Mix (Applied Biosytems) using 20 uL reactions, 2 uL input of extracted nucleic acid, 900 nM forward primer, 900 nM reverse primer, and 250 nM of probe. Reactions were quantified using the LightCycler 480 Instrument (Roche).

[1016] To recover mature RNAs of AvCAST and PmcCAST, each pCascade(AvCAST, AvPSP1 spacer) and pCascade(PmcCAST, PmcPSP1 spacer) was transformed into BL21-CodonPlus (DE3)-RIPL Competent Cells (Agilent 230280). A 10-mL culture was grown in Terrific Broth media (TB) supplemented with 50 mg/ml spectinomycin at 37° C. with shaking at 150 rpm until an OD600 of 0.6 was reached. Cascade and crRNA expression was induced by supplementation with IPTG to a final concentration of 0.5 mM. The cells were incubated at 16° C. for 16 h, and then harvested by centrifugation for 10 min at 4° C. at 4000 rpm. Total RNA was extracted by TRI-zol-chloroform (ZYMO RESEARCH) and DNaseI treatment. Ribosomal RNAs were removed by Ribominus Transcriptome Isolation Kit (Invitrogen), and the remaining RNA was treated with 50 terminator exonuclease, T4 Polynucleotide Kinase, RNA 50 polyphospha-tase, and used as input for NEBNext Small RNA Library Prep Set for Illumina (NEB). Prepared libraries were sequenced using a NextSeq 500/550 High Output Kit v2, 75 cycles. Paired-end reads were aligned to their respective reference expression plasmid sequences using BWA. Resulting transcript sequences were analyzed using Geneious Prime.

[1017] TnsA, B, C, and D of AvCAST and TnsAB, C, and D of PmcCAST were individually cloned into ColEl-based pTwinStrep-SUMO bacterial expression vectors. Each vector was transformed into BL21-CodonPlus (DE3)-RIPL Competent Cells. A 5-mL starter culture was grown in TB supplemented with 100 mg/ml ampicillin for 12 h, which was used to inoculate 4 L of TB for growth at 37° C. with shaking at 150 rpm until an OD600 of 0.6 was reached. Protein expression was induced by supplementation with IPTG to a final con-centration of 0.5 mM. The cells were incubated at 16° C. for 16 h for protein expression, and then harvested by centrifugation for 20 min at 4° C. at 4000 rpm (Beckman Coulter Avanti J-E, rotor JLA9.100). Cell pellets were stored at 80° C. for later purification. All subsequent steps were performed at 4° C. Cell pellets were resuspended in 200 mL of lysis buffer (50 mM Tris-HCl, 500 mM NaCl, 10% glycerol, 1 mM DTT, pH 8.0) supplemented with complete Protease Inhibitor Cocktail (Millipore Sigma 4693116001). Cells were disrupted using the LM20 Microfluidizer system at 18,000 PSI. Lysate was cleared by centrifugation for 30 min at 4° C. at 9500 rpm (Beck-man Coulter Avanti J-E, rotor JLA-10.500). The cleared lysate was applied to 2 mL of packed Strep-Tactin Superflow Plus (QIAGEN 30004) and incubated with rotation for 1 h, followed by washing of the protein-bound beads in 50 mL of lysis buffer. The bound SUMO-tagged proteins were eluted in 10 mL of lysis buffer supplemented with 2.5 mM desthiobiotin (Sigma). The eluted proteins were further digested by Ulp1 SUMO protease at 4° C. for 16 h. Resulting Tns proteins were concentrated using Amicon Ultra Centrifugal Filter Units (Millipore), and protein concentration was estimated by NuPAGE (Invitrogen) and eStain L1 Protein Staining Sys-tem (GenScript). The concentrated protein was loaded onto a gel filtration column (Superdex 200 Increase 10/300 GL, GE Healthcare) equilibrated with storage buffer (50 mM Tris-HCl, 500 mM NaCl, 5% glycerol, 2 mM DTT, pH 7.5) via FPLC. The resulting fractions from gel filtration were analyzed, and the fractions containing the protein were pooled, snap frozen as 1 mg/mL aliquots, and stored at 80° C. In vitro transposition reactions were carried out with 200 nM of each Tns protein, 100 ng of pDonor(AvCAST)_CmR, and 100 ng of pTarget for AvCAST in vitro (E. coli—glmS) in a final reaction buffer of 26 mM HEPES pH 7.5, 5 mM Tris-HCl pH 8.0, 50 mg/mL BSA, 2 mM ATP, 2.1 mM DTT, 0.05 mM EDTA, 0.2 mM MgCl2, 50 mM NaCl, 21 mM KCl, 1% glycerol supplemented with 15 mM Mg(OAc)2 based on in vitro Tn7 reaction protocol (Bainton et al., 1991). Total reaction volumes were 20 uL, and reactions were incubated for 2 hours at 30° C. For PmcCAST, pDonor(PmcCAST)_CmR and pTarget for PmcCAST (bearing ATG+PmcPSP1 and tRNA-Val) were used. The resulting products were purified using Wizard SV Gel and PCR Clean-Up System (Promega), followed by diagnostic PCR.

[1018] Applicants searched for new CAST loci using type I—F, I—B, and V-K components in prokaryotic and metagenomic databases (nucleotide sequence available in August 2019 in NCBI database restricted to Prokaryotic sequences WGS and GenBank, and MG-RAST) (Kee-gan et al., 2016). First, Applicants identified contigs where CAST components (TnsA, TnsB, TnsC, TniQ/TnsD plus Cascade IB, and TnsB, TnsC, TniQ plus Cas12k) are colocalized to form a full CAST locus (CAST-IB: TnsA, TnsB, TnsC, TniQ/TnsD plus Cascade IB; CAST-IV: TnsB, TnsC, TniQ plus Cas12k) within a 50-kb region using tblastn (bitscore superior or equal to 30) (Altschul et al., 1990) from each CAST component extracted from previous literature (Faure et al., 2019a; Peters et al., 2017). Then, Applicants extracted each CAST component from all contigs, clustered them by protein type (TnsA, TnsB, TnsC, TniQ/TnsD, Cas6Ib, Cas7b, Cas8b, Cas5b, Cas12k) and by sequence similarity using mmseqs2 (Steinegger and So*ding, 2017) (50 percent of sequences identity 50 percent of coverage), aligned members together within each clusters using mafft-einsi (Katoh et al., 2005), and created a hmm profile for each cluster using hmmer (Eddy, 2009; Katoh et al., 2005). From these profiles, Applicants searched for additional contigs where CAST components (TnsA, TnsB, TnsC, TniQ/TnsD plus Cascade IB, and TnsB, TnsC, TniQ plus Cas12k) are colocalized within a 50-kb region using hmmsearch (bitscore superior or equal to 30) against a translated version of the nucleotide database. For each CAST locus, Applicants predicted gene boundaries using prodigal version 2.6.3 (model meta) (Hyatt et al., 2010) and Cas profiles database (Makarova et al., 2020). Applicants predicted CRISPR arrays using minced software (github.com/ctSkennerton/minced) (minimum repeat size 16, maximum repeat size 50, minimum spacer size 20, maximum spacer size 50). Applicants predicted tRNA and other ncRNA using tRNA-ScanSE version 2 (Chan and Lowe, 2019) and Infernal version 1.1.3 (Chan and Lowe, 2019; Griffiths-Jones et al., 2003; Nawrocki and Eddy, 2013) with Rfam database. Transposon ends were determined manually on Geneious framework (Kearse et al., 2012; Price et al., 2009) using the following methodology. Applicants searched for repeat segments of 10 nucleotides with a maximum of 3 mismatched nucleotides and looked for inverted repeats embedding both the transposon components and the Cas components. For every candidate, Applicants used the opposite inverted repeat and ran a similar search. Applicants looked for two blocks of inverted clustered re-peats that embed CAST components and validated the ends when possible by searching for the duplication site on both sides of the transposon. If no candidate was found with this repeat search method, Applicants used blastn-short (Altschul et al., 1990) (word side=7) to initially identify repeats, and performed the same downstream strategy to find the transposon's ends. The structural comparison of TniQ was performed under PyMOL framework version 1.2 (The PyMOL Molecular Graphics System, Schro* dinger, LLC) and using Hydrophobic Cluster Analysis (Callebaut et al., 1997; Faure and Callebaut, 2013a, 2013b). Phylogenetic trees were built with FastTree (Price et al., 2009) using the Whelan And Goldman model (WAG model) and visualized with iTOL (Letunic and Bork, 2007).

[1019] The number and definition of replicates for each experiment can be found in the corresponding figure legend. To quantitatively define PAM preference, insertion read counts stratified by the PAM sequence at the 6N randomized library position were normalized by abundance of the corresponding PAM in the input library. PAMs displaying greater than 16-fold enrichment in abundance compared to the input library were input into WebLogo (weblogo.berkeley.edu/) to obtain the corresponding sequence logo. Sequencing data was converted to coverage maps using Geneious Prime and its built-in Geneious aligner. All remaining quantitative data was processed and visualized using GraphPad Prism.

### Example 25

[1020] Exemplary CAST IB-1 and CAST IB-2 systems are provided herein. Further exemplary CAST IB-1 proteins are detailed in Table 12 below. CAST I-B1 uses TnsD to home to glmS and TniQ to RNA-guided transposition

TABLE 12
CAST IB-1

| | | | SEQ |
|---|---|---|---|
| Contig | Protein | | ID |
| Accession | name | sequence | NO: |
| NNBU01.1\|N | TnsA | MARSKQDWTQAKFERYLKEGRGQGSGKGYQPWIKIQDFPS | 397 |
| NBU010000 | | KGRVSRPPGWKTNREHHLLSDNEKRLFYVFEWSDTIVDIR | |
| 31.1\| | | EQFPLIDLDLAMSIAEEIGINYPKDPESNTARVLTTDFML | |
| 187002\| | | SVKQGKKIVQKARTFKLTKDLGSKSVAEKFELEKRYYAAK | |
| Plant | | GIDWGIITEKEVPKQLAENVEWVHTAYKLEENADINLEEL | |
| | | RDIANILKSRLQESDANINRITTDLDKNMNIESGTSLYLF | |
| | | RHLIAKKEIIMDMLATKISSCPSSGAIKKIIL | |
| | TnsB | MSNDLFVNDLIEWIDESGNSFIERVLWIDEGYIIAFVFNI | 398 |
| | | NTKTGFPEPKKVSEIVEAISNGSALKLKSDPWARIVTEED | |
| | | LSEKEKELRDRAWEIISFIVIQEPSIYYRDYRGALVQQTI | |
| | | EKYNTGRSKGKLVEISVYKYLRRFWQRGKNKNALLPDYVN | |
| | | SGGKGKPKASGEKKRGRPRKYVHDQEIGIGINVTEEDRKI | |
| | | FRFAIAKFYNNSKENFLTTAYDLMIKEYYSEDFYYDENGV | |
| | | KKSILIPPDKRPTFTQFKYWYEVEQSDIRKTIISRKGSIK | |
| | | YALEHRAITGTSQMETIGPGSRYQIDATIADVYLISMYNR | |
| | | NWIIGRPVIYVIIDVFSRMITGVYVGLEGPSWAGAMMALA | |
| | | NSATDKVKFCQEYGVEISGDEWPCRHIPDTILGDRGELVG | |
| | | MKVETLIPNLDVRIENAAPYRADWKGLVERQFRTIHGYVK | |
| | | PFVPGYIDTDFRQRGGHDYRLDGRLNIDEFTKIVIFLILQ | |
| | | HNNHDYLTKYARDEMMITDDVNPIPRELWQWGIANRSGRL | |
| | | RTFPEDIVKLNLMPAEKATITARGIKFKGMYYTCEKARKE | |
| | | FWFEKSRSSLLSKSEKSLDISYDIRQSKYIYLRSPNGRDF | |
| | | EKCFLLESEQRYLDKNLYDIEYLFAYEELQRQKHQGKRLQ | |
| | | EKVDLIANIESIVSKAKEDTEAVLDDNTSNRQKVAGIREN | |
| | | RAFEKDRRRKNEGFELAKEEITNSTEATNNKVNTQSEDLE | |
| | | SSKLLKPDHMDLLRRKRQERKRGED | |
| | TnsC | VEKIEGELVMIPNGKSAIVARYIDQKLPEYNTNPLIQALP | 399 |
| | | PILSSEEFIDKVTRTPDFDEQERQLEAHYRFHCIERLSRY | |
| | | FDPQNKTVELQKVINVLIMTGYLARNILTPDYANRSRQIY | |
| | | NAIKDGGGKNLQSYVNLPTSASGLTLIGPSGMGKSTNLHN | |
| | | ILNLYPQVILHPNYSVYQIVWLKVDCPKTLKGLCTDIFMT | |
| | | IDQLLGTTLFNKFNSSRSSEDYLLAQLAQIAHTHHLGVVV | |
| | | IDEIQNLVTTRRSRDEILNFLVKLDNIIGIPVIRVGTNEA | |
| | | ISILQGNFRNARRNTGEGSVIWDRMINDDEWCFFLEGMWE | |
| | | YKWTKTPVFLSDEIKEVFYEESQGIIDIAVKLYKMLQWRA | |
| | | ISIGGKEIITTELLRKVAKDGLYLVKPMLDAIRSGDKEWM | |
| | | IKYKDIAPLDTTEYQNKCRSELESKDLQEIRRLARKQQTY | |
| | | QKVSPKLNYVILELLKLEVEPAKAKECAEQVIVSSDEDAD | |
| | | ITLLTKKAYTLALQGGQVNESLVKANISKAKLKPKYQGND | |
| | | IRGIVENAKKEKKFAYDDLKLAGIIKNPVEDFINI | |
| | TniQ | MLSFFPTLYPDELLYSSLARYHIRSGNKSFKQTDLELFGY | 400 |
| | | SSQQVCKVTLTNNVNYLVKNFPLRSQQTVDNLLQNHTLYP | |
| | | FYATFLMPQEAWLLKDSMSKKLSGSILEIAKVATGSSGES | |
| | | KNFLKFCPGCLEKDTQQYGEPYWHRTHQVPGILVCPTHGV | |
| | | VLWDSCVALESKGIHYYAASVYNCLVITDVKSFTNQALRT | |
| | | LLTLTSDINLLIHSNFTFKGLAWLRTQYQRYLVNKGLLQI | |
| | | FPGGKLKFDEYAFSKLIFDFYGQESLEALNPKLTQHQGKY | |
| | | FSHCLLGCDLNPAVDRITHILMVKFLANSIEAFFQE | |
| | TnsD | MLGFFPAPYPDEILYSILARYHIRSGNTSPKITLRELFNS | 401 |
| | | QDVIATVDLPSNLNSLIENLQFISNYQVEDLIYKYTLYPF | |
| | | YSIFLPQKRASQVMDSMKADFGGDIHTRTGIMASSLKMQR | |
| | | YLQFCPKCLEEDLQNYGESYWHRLHQTPGVLVCPLHGVTL | |
| | | QDSTIFMQGFNRHEYYATSLENCPVVPIQQTYSQETLKKL | |
| | | LLLAQDISWLITNNLFSRELEWFQKKYIALLIEKDFATAT | |
| | | GRVNQKRLLDNFLFFYGAEVLEAVNSMVNYENEQNWLFSI | |
| | | VRKHRKSFHPIRHLLVIRFLTNSIEEFFNTDYQYKPFGEG | |
| | | SWLCLNAAVDHYLKPVITNLVVTHCLDNKKPLGTFSCSCG | |
| | | MVYCRTGPDETDEDKQRIGKVLTYGQFWEQKLKELVEIQK | |
| | | LGLRETARQLKVDSRTVKRYTAILKLKTFWKSSEKNLLVD | |
| | | SQEVLNLNLNLASDDRIKYRELWKALQQQYPEASKTTLRG | |
| | | LAKGTYIWLYRNDKEWLNKNSPSLKVPLPCVGKVDWAERD | |
| | | KQVLEKVKTAVRTFLSAEKPARVTICRIGKSIGLLALLEK | |
| | | HLAEMPLTKVYLESVTETVEDFQIRRIKWAIKQLDDCGEE | |
| | | IQPWKVIRLAALRENCSQRVQAALENELYKQPN | |
| | Cas6 | MVVDCSLPTQILSESPLNLTKPTEVLTPHLPYIDLIFNLI | 402 |
| | | GETVPLDHGYELFSAIAHFEPELHKLNTVGINTIAGIPKE | |
| | | GVIQLTKNSRLRIRLPVDQVRLVYPLAGKSLKIGKHTIRL | |
| | | GIPEIYLLEPAERLRSRIVIIQSYQEPESFLAAAQRQLEK | |
| | | LGIQGKAFITKNTDGSPKRRSIKIKRFTVVGFGLEIINLS | |
| | | DEDSLTLLRYGIGGKRKMGCGVFVPVKRKGNAS | |
| | Cas8 | MSVVASVVNPKIQLNLGDPSITWIHRAGIAGLWMTLKQLE | 403 |
| | | KLYPIPAERPGNLTWFLTHRSISLEWQGQDFVVLDWLLKQ | |
| | | SFQINEEGLISLTGLNTHSINIETRINIHLGITGTFLQHN | |
| | | QVFKFDGGKSWSLIVDGIEIDVEYKKAVSYAHQHFAKQLC | |
| | | DKQGQLLGQSIGVAGWLYPGSVVRHVAFTKETRFEEKPQL | |
| | | AFALLYAPVACHYFVLRSHTKPEHTQYALVIPEVVDLEIY | |
| | | AQEYWNLENLDYKDFNVSSLGDAALRYLTYETIIELAIPD | |
| | | QVKRCQVILFGTVVWSKQQKTRIEIAVVEATGIINFIYKL | |
| | | SGISFPEYQIIQYKNKNFIISNLFRGTIADNLVKGFPWWA | |
| | | NLYTIFKNKSLFKFITNDGAYKMIQNSEWNLESQKLFIKA | |
| | | CHEALKKIYAKIYGRTNEGQYAQIERENIRILSQLGRCTN | |
| | | AENFRKFIAEFWGRAGQLSILEKHWEELLPLTSGIMDWKV | |
| | | ARDLTFIALASYPKSNMVEKQILEIPDSNSE | |
| | Cas7 | MFHLFGNILTSYGTAANNRGENEGNITPLQKLNWKGEVHT | 404 |
| | | LVSSEAIRWALRYYWQNVGYPVNRRWDENAQPVADHVWQD | |
| | | PNFDDIRFIDDDVLGFMQAEAAKAEASDESEGEAEEASQN | |
| | | ENKKISKGKDKQTSPRKGKQKPKGKITARRGVLEVTRAVS | |
| | | MIPFTGDITFNAVSGVKGRNSLYATEIHATRYQYGFALTP | |
| | | DSLKDKSRIHAVLDGLISIGEVAGNHARFLYDFSPESIVL | |
| | | RWTDDFSPRFLYCFEQDELGNLSVSNLVRQVEVGDIDPKE | |
| | | LWIGGLISQGLEDLGANVFPGVKSAVKALKQVIAEDLQLS | |
| | | SGSD | |
| | Cas5 | MMTIALKVEVPIACFRQSRAREYAETYPVPPPSTVYGMLL | 405 |
| | | SLIGETDRYKHCGTQLAIALLSKPEKSIVIRTFRRFKTKD | |
| | | IHHPKNAKPDYQELLTNIEFVVWVKTDKAKPTLPELLQQA | |
| | | FANPASINRFGGLCLGESRDLVNTVTLLPENYHGESLWWL | |
| | | VTDEDGSLTLPYWVDHVGSKRTRWQCYELQESQVWQPPDL | |
| | | SWTTIQTS | |
| | end1 | GTCGAGTAAAAAAATACAAATAATTCAGTAATATGTATAA | 406 |
| | | CAATAATAAAGTCGTATAACAAATAAAAAAGTTATACAAT | |
| | | ACATAAAAAAGTTATACACTTTATCCTGTAGGCGCGT | |
| | end2 | GCTTTGTACTTGGAATGCGATCGCCACTAAATCTTGGAAC | 407 |
| | | AAATATTCCCAAATCCTTACACGGAAGTAGGTTGCAAAAC | |
| | | TATACAACTTTTTTATTTGTTTTTAGATAGTAGCATAATA | |
| | | AAATTGTATAACTTTATTTTTTCAAAAATTCTCAGTGCCT | |
| | | AACGATAGAATAGTGTTTGTAGCCGCGCAAATTGTACAAC | |
| | | TTTTTTAGTTGTTTACATAATATTGTGGAGGAATAAAAAA | |
| | | GTTGTACTATTTTTCCTATGGGTGTATCTACCAAGCATCC | |
| | | ATAGGAGAACCTTTTGTTGATGAGACTAATAAAATTATAT | |
| | | GCGGCGTGATTCTATTTTTTATTTATTTTAAAAATAACCG | |
| | | AAGCTAGTGTTTAAGTTACTGAAAAAT | |
| | CRISPR | GATGTCGTCAGACGTTGAGCAGTCGAATACTTCGATGGAG | 408 |
| | array | CGGAGGAGCTATCAGCGCTTCTTTAACATTGGATGTCGGC | |
| | | AGACGTTGAGCAGAGATTGCGTTCACCATCAAAGAACAAG | |
| | | CCAATTGGAGTTCTTTAACATTAGATGTCGTCAGACGTTG | |
| | | AGCAGGTTGGTGTTCCAGCGATTGACTATACCGAGATGCA | |
| | | AGTTCTTTAACATTAGATGTCGTCAGACGTTGAGCAGACT | |
| | | CAAGCTCAAGCAAGTAGGTTATGGGCGATAGTAGTTGTTT | |
| | | AACATTGGATGTCGTCAGACGTTAAGCAA | |
| GCA_ | TnsA | MARSKQDWTQAKFERYCKEGRGQGSGKNYQPWIKIQDFPS | 409 |
| 0011597855.1_ | | KGRVSRPPGWKTNREHHLFSDNEKRLFYVFEWSDAIVDIR | |
| ASM15978v1_ | | EQFPLLDLDLAINIADEMGINYPKDPQSNTPYVLATDFML | |
| genomic\| | | SVQQGKNIVQKARTFKLTKDLGSKSVAEKFELEKRYFAAK | |
| 201628\| | | GIDWGIITEKEVPKQLAENVEWIHTAYKLEENADINLEEL | |
| Anabena | | RNIANILKFRLQESDASINKITTVLDKEMNIESGTSLYLF | |
| | | RHLIARKEIIMDMLVNKISSCPSSKEIQKIIF | |
| | TnsB | MINDLFVNDLIEWIDESGNNFIERVLWIDEGYIIAFVYDI | 410 |
| | | NAKTGFPEAKKVSEIREAISDGRALKLKSDPWARIVRDED | |
| | | LSEKEKELRDRAWQIISFIVTQEPSIYYRDYRGTLVQQVI | |
| | | EKYNAGRTEGELVPITVYKYLRRFWQRGKNKNALLPDYAN | |
| | | SGGKGKPKSSGDKKRGRPRKYAQVPEIGVGRNVTEEDKRI | |
| | | FRFATAKFYNNSKENFLTTAYDLMIKEYYAEDFYYDDNGV | |
| | | KKSILIPPDKRPTFTQFKYWYEVEQTDIRKTMISRKGSRK | |
| | | YALENRAITGTSQMETIGPGSRYQIDATIADVYLVSLYNR | |
| | | NWIIGRPVIYVVIDVFSRMITGVYIGLEGPSWTGAMMALA | |
| | | NAATEKVKFCREYGIEISEDEWPCKHIPDTILGDRGELAG | |
| | | MTVETLIPNLNVRIENTAPYRADWKGLVERQFRIIHGYVK | |
| | | PFVPGYIDTDFRQRGGHDYRLDGRLNIDEFTKIVIFLILQ | |
| | | HNNHDYLIDYARDEMMITDDVNPIPRELWQWGIANRSGRL | |
| | | RTFPEDIVKLNLMPTEKATITARGIKFKGMYYTCEKARKE | |
| | | FWFEKSRSSLLSKSEKSLNISYDIRQPNFIYLRSPNGREF | |
| | | EKGWLLESQQRYLDKNFYDIDYLLAYEKLQNQKHQGTRLQ | |
| | | AKADLIANIESIVSQAKEETEAVLDDTISNRQKVSGIRQN | |
| | | RADEKNARRKNEAFELAKAETPNTDNTKNLINTQSEDSED | |
| | | SKLLQPDHMDLLKRKRQERKRGK | |
| | TnsC | VESNEEEVVSIPNGKSAVIARYIDQKLPEYNANPLIQALP | 411 |
| | | PILSAEEFIDKVTRTPDFDEQERELEAHYRFHCIERLSRY | |
| | | FDPQNKTVELQKVICALIMTGYLARNILKPEYASRSRQIY | |
| | | NAIKDGGGKNLENYVNLPTSASGLTLIGPSGMGKSTNFQN | |
| | | ILNLYTQVILHPEYSVYQIVWLKVDCPHAGSLKGLCTDIF | |
| | | LAVDRLLGTNYFKKFGSSRNSEDYMLAQVAQIAHTHHLGV | |
| | | LVIDEMQNLVTARRRSSDMLNFLVKMDNTVGIPVIRVGTN | |
| | | EAFPILQGNFRNARRGTGEGSVIWDRMVNDDEWYFFMEGM | |
| | | WEYQWTKTPVPFSDEINEVFYDESQGIIDIAVKLYKMVQW | |
| | | RAISIGGKEIITIELIRQAAKDGLYLVKPMLDAIRSGDKE | |
| | | WMIKYKDIAPLDTTEYQNKCLSELDSKDLKEIRRLARKQQ | |
| | | NQQKVSPKLNYVILELLNLEVEPAKAKECAEQVIVSSDED | |
| | | AEIPSLVKKAYALALQGGQVNESLTKTNTKKAKLKPNYQE | |
| | | NDIRRIVENANKEKKSAYEDLKLAGIIKNPVEDFINI | |
| | TniQ | MLSFFPTLYPDELLYSTLARYHIRSGNKSFKQTDLELFGY | 412 |
| | | SSQQVCKITLTNNLNYLVKNLPLRSQQKVENLLQNHTLYP | |
| | | FYATFLMPQEAWLLKNSISKKLSGSILDVAKVATNSIGDS | |
| | | KKFLKFCPECLEKDTQKYGEPYWHRIHQVPGILVCPTHGI | |
| | | VLQDSCVKVESKGVHYHAASVDNCLVACKVKNLTNNTVKT | |
| | | LFTLVNDINWLIHSNFAFQGLAWLRAQYQRYLVDKGLLQT | |
| | | FPGGKFKFDEYGFAQLIFEFYGQESLEAINPKLTQHQGKY | |
| | | FSHCLFGCDLSPAIDRITHILLIKFLANSIEEFFQ | |
| | TnsD | MVSFFPKPYPDEILYSVIARYHIRSGNTSPKITLQELFNS | 413 |
| | | QTTVATVDLPSNLNNLIQNLQFISNYQVEDLIYKHTLYPL | |
| | | YSPFLPANRSSQVLESMKGDYGGDIHTRAGIMASSITMPK | |
| | | YFRFCPTCWEEDLKNYGEPYWHRIHQIPGVLVCPFHDEVL | |
| | | QDSLAPLHGFNKHEYYAASTDKCSITKEPSIFSPDTLKKL | |
| | | LVLAKDFWWLLNSEIPCQEPQWFRKQYTNLMIEQGLATAT | |
| | | GRIYQKKLLDNFLFFYGREMLSAVNSIVTHNDSSNWVTSI | |
| | | VRKHRKSFHPLRHLLMMRFLKTSVEEFFKQDNKYKPFGEP | |
| | | PWLCLNAAAEHYLQPVITNLVITLCCDTKKPVGTFSCTCG | |
| | | MVYCRTGPDETDDDKLRIGKVKAFGQLWEQKLKEFVEVEK | |
| | | LGLRETARRLNVDPGTIKRYVSLLKLTTYWQTRKENGSVD | |
| | | LQEVAEIHPNSATELKLKHRQDWMALQAQNPDASKTTLRK | |
| | | LAPATYIWLYRNDREWLNQNSPALQVAVPSVVRVDWQERD | |
| | | RQILAQAQDAVRSLINADTPERISISRVGKTIGLLALLEK | |
| | | HLDQMPLTKAYLESVVETVEDFQMRRIKWAIKLLDECGEE | |
| | | IMRWKVVRVAALREDCSERVNAFLENELDKAYKKER | |
| | Cas6 | MIVDGNLLRQIPSESPPKPRELLMSQLPYMDLTFNLIGET | 414 |
| | | LPFDHGYELFSAIAHFEPKLHTLDTLGIHTIAGIPKDGVI | |
| | | NLTQNSRLRVRIPVNQVHLVYPLAGKSLRIGKHTIRLGIP | |
| | | DICLLQPAEQLRSRIVVIRGHEEPETFLVVAQRQLEQLGI | |
| | | QATASIPTKANGKPIRKTIKIKRFTVVGFGLEVTNLSNED | |
| | | SLTLQIHGVGGKQKMGCGLFMPIQERQ | |
| | Cas8 | MKTAANPKIQLNLGDPSMTLLHRAGVAGLWMTLKKLEKIY | 415 |
| | | PTAAQRIGNFTWLLTPSNISLYWEGQDFTVLDWLLKHSFQ | |
| | | ISDEGLISLTGLDSQNMDIQTQIIIHQGITATFIQHNKFF | |
| | | KSAGQQSKQLIIDGIQLRVDYKKAASYAHQHFAKHLCDQY | |
| | | GQLLQEPIGIRGWLYPGAVVRHYAFKEQTAFEEKAEYALA | |
| | | LLFAPVACQYFVLRSHTEPSHTNYVLVVPEVIDLELYAQY | |
| | | LWYLSKLDYKHFHVSSLGDAGLKFITYEAKQLDNFNFIKR | |
| | | CQVISFSTKAWSERQKTRAEIAIIELNSSVSYLYKLSCIC | |
| | | FPNCQVVIYKNQHFLLPSLMKGIIANNLAMGWPWWANWIS | |
| | | VIKNNKSFKQFTDEYIGINKMIQDSEWDIEAQKLFIQACH | |
| | | EALRKIYAKIYSRMKEGGYAQIERENTRILSQLKRCTNAD | |
| | | NFRKFIAEFWGRAGQMTILEEHWVELLPLTTGIGNWKVAR | |
| | | DLTFIAMASYPKNKITEV | |
| | Cas7 | MFHLFGNILTTYGTAANNRGENEGNTTTLQKLIWKGEVHS | 416 |
| | | TVSSEAIRWALRYHWQNAGYPVNRRWDENAQPVADHIWED | |
| | | PNFDDIRFIDDDVLGFMQAEAAKVEAADESEVEIQNSTQD | |
| | | ENQTTSQGEEKKTSQRKRKQRPKGRISARRGVLEVTRAVS | |
| | | TIPYAGDITFNSMSGKKGRTSLYATEVHATRYQYGFALTP | |
| | | NRLKDKSRIHAVLDGLISIGDVAGNHARFFYDFSPDSIIL | |
| | | RWTHDFSPRLLYCFEEDELRNISTPDLVRRVEAGDIDPKE | |
| | | LWIGGAIASTLENLGANLFPGVKATVEALKQVIIEDLQLS | |
| | | LRSS | |
| | Cas5 | MTTIVVKVEVPIACFRQSHAREYAETYPVPPPSTVYGMLL | 417 |
| | | SLVGEVDRYKHCGVKLAIALLSKPEKSTVIRTCHRFKTKN | |
| | | IHESKNNKPDYQDLLTNIEFVVWVDAGADKAKPNLAQRLE | |
| | | EAFTNPASINRFGGLCLGESRDLVNDVSLLPENYYAESMR | |
| | | WLIRDDYGLLTLPYWVDHVGSRGTRWLCYEIQEFQVFQPP | |
| | | ELSWTSIQSD | |
| | end1 | TCGGTAACTGTGGAGTAAAATAATACTTTAAATAAGTATA | 418 |
| | | ATTGTACAACAATAAAAAAGTCGTATAACAAATAAAAAAG | |
| | | TTGTACAATATATAAAAAAGTTGTACAATATATCCTGTGG | |
| | | GTGCATATGC | |
| | end2 | TGACATTCTCAAAACTAAATTAGTTATTAACCCAAGTTGC | 419 |
| | | TAGTTATGCCGAAGAGCGATCGCAGTGGGTTCCATTGCCG | |
| | | CTTCAGAATGGATAGTTAACAT | |
| | | ATACTCTCAAGGCGACTGTATTTACTGCTTCCCTGCGTGG | |
| | | CGTAGCCATTCCTGTTACTTAATGTTTCCGGTTTTAGTCG | |
| | | ATACTATTACCATAGCAGCAATAGAGGGATTACTGATTAA | |
| | | GCTTGCTCTGGAGAGCGATCGCAAGTTATTTTGGAACAAA | |
| | | TAGATGCCAAATCCTTACAGGGCTTGCTTTCGGCAAATTA | |
| | | TATGACTTTTTTATTTATCAATATGAGGCATTTCTGAAAA | |
| | | ATTGTACAACTTTATTTTTTGATATCAAATAAAATTGAAC | |
| | | GTAAATACAAGGCTTATAAACTTTCAAATTATATAAGTTT | |
| | | TTTATGTTTTTACAATAATTTGGTAGAATAACCAGATAAT | |
| | | TTCTGAATGTGATGATAATATTATCACA | |
| | CRISPR | GTGCTTTAACATTAGATGTCGTTAGGCGTTGAGCAGTGAT | 420 |
| | array | TAACCTGAAGGCTTGCTCCGGGATGTTGTAGGTGCTTTAA | |
| | | CATTAGATGTCGTTAGGCGTTGAGCAGCACCGGTACCGCG | |
| | | AGTAGTCGCACCAATATTCATATGTGCTTTAACATTAGAT | |
| | | GTCGTTAGGCGTTGAGCAGTTGAATGCGAAGTTATCGGCA | |
| | | GATGTTTTGTTGTTGTGCTTTAACATTAGATGTCGTTAGA | |
| | | CGTTGAGCAGTGACCATTGGTGTATCCATCAATCCTGACT | |
| | | GCTGCGTGCTTTAACATTAGATGTCGTTAGGCGTTATCTA | |
| | | CT | |
| GCA_00190 | TnsA | MVRGRREWTQAKYERYIKEGRGRGSGKDYKPWLTIQDFPS | 421 |
| 4715.1 ASM | | KGRSSRTPGWKTNRVHHFFSDHEKRLFYLFEWSDIVTDIR | |
| 190471v1_ | | EQFPLDNLDLAMSIATDIGIKYPIDTQSGTPHVLTSDFML | |
| genomic\|MRBZ | | TVNHNGKRTQIARTVKQSTELEKKRVNEKLEVERRYYLAI | |
| 01000072.1\| | | GIDWGIITEKEISRLLAENVEWIHSAYRLEANSEMDTVQL | |
| 42454\|Nostoc | | RELSKILKSKLQEEDATINKITIALDEEMNINYGTSLYVF | |
| | | KHLIARKELIVDLVKIKLSACPSAKVIEKIIF | |
| | TnsB | MAQDLFVNDLIEWMLDSKTHVIERIVWIDEGYIIAFVIDI | 422 |
| | | NAKKGLPEAKKISDICDAISEGIAFKQQRDPWARIIRDEN | |
| | | LTDREKEYRDKAWEIISSLVTEEPLIYYRNFRGSLVKQVV | |
| | | EKYNLEKNKDKLVEKTVYGYLRRFWQRGKNINALIPDFIN | |
| | | SSGKGKIRGQSSKKRGRPKKYAHDPDIGEGVNVTEEDRMI | |
| | | FRIAISKFYNNPKQNYLTTAYDLMVKNYYKEGIRYDENGV | |
| | | QKSILTPTDKIPTITQFKYWYQLEQDDVTKTLTSRKGAKR | |
| | | VALENRAILGTSKMETIGPGSRYQIDATVADVYLVSKYNR | |
| | | NWIIGRPVIYVIIDVFSRIIAGVYVGLEGPSWTGAMMALA | |
| | | NVATDKTLFCKEYNINITEDEWPCNQMPDAILGDRGELAG | |
| | | MTVETLIPNLYVRIENAASYRADWKGLVERHFRIIHEYVK | |
| | | PFLPGYVDTDFRQRGARDYRLDGKLDIDQFTEIIVHLIVH | |
| | | HNNKPLKEYERDEAMIADDIPPIPTELWKWGITNRSGRLR | |
| | | TFSEDIVKLNLMPTEKAIITAKGIKMRGKEMYYTCDSAEK | |
| | | GQWFEKARSNLLSKSDKSLIVSYDIRNLNFIYLPSSDGRD | |
| | | FEKCFIIDSEGRYANKNFYDIEYLLAYEELQRQKNQGKQL | |
| | | QEKVDLIAEIESIVDRAEKMTNAAQEPNLSKTKKLSGIRE | |
| | | NRAFEKAKRRENERFELANTENKNSFQAVESNLETSEQPE | |
| | | SLQPNHLDILRKNRQERKLGQE | |
| | TnsC | MDRNEGELIRIPNGKLAVVARYIDQKLPEYNANPLIQALP | 423 |
| | | PILSAKEFLNKVTITPEFHEQERELEAHYRFHCIERLSRY | |
| | | FDPQNKTVELQKVICTLIMKGYLARNLLKPEYASRSRQIY | |
| | | HAMEDGGGKNLEKYVNLPTSASGLTLIGPSGMGKSTNFQN | |
| | | ILNLYDQVIFHPDYSVYQIVWLKVDCPKTLKGLCTDIFTE | |
| | | IDKLLGSKLFNKFSSSRSSEDYLLAQLAQIAHTHHLGVLV | |
| | | IDEIQNLVTTKRSRDEILNFLVKLDNIIGIPVIRIGTNEA | |
| | | ISILQSNFRNARRSTGEGSVIWDRMLNNDEWCFFMEGMWE | |
| | | YQWTKTPVPFSEQLKEIFYYESQGIIDIAVKLYKMVQWRA | |
| | | ISIGGGEVITIDLIRQAAKDGLYFVKPMLDAIRSGDKEWM | |
| | | IKYKDIAPLDTTEYQNKCLSGLDYNDLKEIQRLARKQQNQ | |
| | | QKVSPKLNWIIARLLELEVEASRAKECAEQVIVINDENAD | |
| | | IATLVNKAYALALQGGQVNTNLVKTSQKKAKLKTKYIEND | |
| | | ILCAVENAQKEKKSAYEGLKLAGIIKNPVEDFINI | |
| | TniQ | MLSFFPALYPDELLYSTLARYHIRSGNKSFKQTDLELFGY | 424 |
| | | SSQQVCKITLTNNLNYLVINLPLGSQQTVDNLLQNHTLYP | |
| | | FYATFLMPQEAWLLKNSMSKKLSGSILDIVKVATNFSGDS | |
| | | KKFLKFCPECLEKDTQKYGEPYWHRIHQVPGILVCPTHSV | |
| | | VLHDSSVGVESKGIYYHAASMDNCLLPSKVKIFTNKTLQT | |
| | | LFILANEINWLIHSNFTFRGLAWLRAQYQYYLVHKGLLQT | |
| | | FPGGKFKFDEFGFTQLIFEFYGQEFLEALNPKLTQHQGKY | |
| | | FSYCLFGCDLNPAIDRITHILMIKVLANSIEVFFQ | |
| | TnsD | MLGFFPAPYPDEILYSILARYHIRSGNTSPKITLRELFNS | 425 |
| | | QDVIATVDLPSNLNSLIENLKFISNYQVEDLIYKYTLYPF | |
| | | YSVFLPPKRATQVMESMKADFGGDIHSRAGIMASSLKMQR | |
| | | YLRFCPKCLEEDLQKYGESYWHRLHQTPGVLVCPVHCVTL | |
| | | QDSTIPIQGFNRHEYHAASQENCPVVSVQQIYSQQSLKKL | |
| | | RVLAQDILWLINSNLLSRELEWFQRKYIALLIEKGFATAT | |
| | | RRVNQKRLLDNFLFFYGAEILEAVNSMVNYKNEQNWLFSI | |
| | | FRKHRKSFHPIRHLLVIRFLTNSIEEFFNTDYQYKPFGEG | |
| | | PWLCFNAAVDHYLKPVITNLVVTHCLDNKKPLGTFSCFCG | |
| | | MVYCRTGPDETDEDNLRIGKVNTYGQFWEQKLKELVEIQK | |
| | | LGLRETARQLKVDPRTVKRYTAILKLKTFWKSSQKNQLVN | |
| | | SQEILDSNLNLANDNKIKYREVWKTLQQKYPEASKTTLRR | |
| | | LAQGTYAWLYRNDKEWLNKNSPVLKVPLACVGKVDWAERD | |
| | | KQVLKKVKNAVRALLSAEKQKPTRISIGRIGRTIGLAALL | |
| | | EKHLAEMPLTRDYLESVKESVEDFQIRRIKWAIQRLDDCG | |
| | | EEIQPWKVIKLAALRENCSERVQAVLESELYKQPD | |
| | Cas6 | MIVDCSLPTQITSESPLKLTESRELLTSQLLYIDLIFNLI | 426 |
| | | GQTVPLDHGYELFSAIAHFEPKLHKLDTVGIHTIAGIPKE | |
| | | GVIQLTKNSRLRIRLPVEQVGLVYPLAGKQLRIGKHTIRL | |
| | | GIPEIYLLEPAERLRSRIVIIQGYQEPESFLAAAQRQLEQ | |
| | | LGIQAKAFITKNTDGSPKRRSIKIKRFTVVGFGLEIINLS | |
| | | NEDSLTLLRHGIGGKRKMGCGVFLPVKRKENAT | |
| | Cas8 | MSVLASVVNPKIQLNLGDPSITWIHRAGIAGLWMTLKQLE | 427 |
| | | KLYPIAAERPGNLTWLLAPRSISLEWQGQDFIVLDWLLKQ | |
| | | SFQINEDGLISLTGLNRHSINIETQINIHLGITATFLQHN | |
| | | QVFKFDGEKSWPLIVDGMEIDVEYKKVVSYAHQHFAKQLC | |
| | | DKQGQLLEQPIGVAGWLYPGSVVRHVAFTKETKFEEKPEL | |
| | | AFALLYAPVSCHYFVLRSPTQLQHPQYVLVIPEVTNLEVY | |
| | | AQQYWSLGNLDYKYSHVSSLGDAALRFLTYKTVAIPNQVK | |
| | | RCQVILFGTVAWSKQQKTRTEIAVVKVTEIIDIVYKLSCI | |
| | | SFSEYKIINYKNKNFIISNMLKGIIADNLIKGFLWWNDLY | |
| | | IKIINFNLSKLILYENRGIYNMIEHSKWDIEAQKLFIRAC | |
| | | HEALKKIYAKIYDRTKEGQYAQIERENIRILSQLGRCTNV | |
| | | ENFRKFIAEFWGRAGQLSILEEHWEELLPLTSGIMDWKVA | |
| | | RDLTFIAIASYPKSKQINTKNLEKAQLGNE | |
| | Cas7 | MFHLFGNILTNYGTAANNRGENQGNITTLQKLIWKGEVHT | 428 |
| | | TISSEAIRWALRYYWQNVGYPVNRRWDENTQPIADHLWQD | |
| | | LNFDAIRFIDDDVLGFMQAEGAKVEASDEPEGGTEEPSQD | |
| | | ENKKSSKGKNKQTSQSKGKQKPKGKITARRGVLEVTRAVS | |
| | | IIPFTGDITFNAVSGVKGRNSLYATEIHATRYQYGFALTP | |
| | | DSLKDKSRIYPVLDGLISIGEVAGNHARFLYDFSPESIVL | |
| | | RWTHDFSPRFLYCFEQDDLGNLSVSNLVRQIEVGDIDPKE | |
| | | LWIGGLISQGLEDLGANVFPGVKSAVKALKQVIAEDLQLS | |
| | | SGSN | |
| | Cas5 | VTTIALKVEVPIACFRQSRAREYAETYPVPPPSTVYGMLL | 429 |
| | | SLIGETDRYKHCGTQLAIALLSKPEKSIVIRTFHRFKTKD | |
| | | IHDPKNAKPDYQELLTNIEFVVWVKTDKAKPTLAERLQQA | |
| | | FTNPTSINRFGGLCLGESRDLVNSVTLLPENYHAELLWWL | |
| | | VTDEDGWLTLPYWVDHVGSRRTRWQCYELQESQVWQPPDL | |
| | | SWTTIQTS | |
| | end1 | ATTTATACTACTAAAGCAGTAATTGTTGTGGAGGAATAAT | 430 |
| | | TCGGTTGAACAATAAATAATTCGATTCAACAATTTATAAA | |
| | | ACGATTGAACAATAGCCTCTAAGGGAGTATGATTGTACCA | |
| | | AGTAAAGGTGCGATCGCTTCTAGAGGTTA | |
| | end2 | | X |
| | CRISPR | GTTCTTTAACATTAGATGTCGTAAGACGTTGAGCAGGAAA | 431 |
| | array | TCAACGGCGCTGATGGGGTTGTCTTGATGCAGTTGAGTTC | |
| | | TTTAACATTAGATGTCGTAAGACGTTGAGCAGACTCTTGT | |
| | | GTGTCCGTCGCATTCTGTTGGAGAGTTGTTCTTTAACATT | |
| | | AGATGTCGTAAGACGTTGAGCAGGTTGGAGTGCCGACAAT | |
| | | TGACTTTAATCAAATGCAGTTCTTTAACATTAGATGTCGT | |
| | | AAGACGTTGAGCAGGTAAGAAATTCCCGCTGTTGCTTCGC | |
| | | TATTGGCTAGGGTTCTTTAACATTAGACTTGTTGGGAAAT | |
| | | AATATGA | |
| NNBT01.1\| | TnsA | MVRGRGEWTQAKFERYRKEGRGRGSGKDYKPWITIQDFPS | 432 |
| NNBT01000035.1 | | KGRSSRTPGWKSNRVHHFLSDQEKRLFYLFEWSDVVTDTR | |
| \|19217\| | | EQFPLDDLDLAMSIATEMGIKYPVDLQSGTPYVLTTDFML | |
| Plant | | TVNQNGKQVQIARTVKQSTELEKKRVIEKLELERRYYLAK | |
| | | SIDWGIVTENEIPRLLAENVEWVHSAYKLEANSEMDIAQL | |
| | | HELGTILKSKLQEHDTAINRVTTALDKEMNIKSGTSLYMF | |
| | | KHLIAAKKIIIEMLETKISAYPSSKVIEKIIF | |
| | TnsB | MHENLFINDLIEWESDGNSQLIERIIWIDEGYIIAFVLDI | 433 |
| | | NSKKGLPEPKKVSEILEAMSEGLAFKQKKDPWSRIIREEN | |
| | | LTDRDKEYRDKAWEIISSLVVQEPSIYYRNIRGSLVRQVI | |
| | | KSYNEGREKDKLVERTVYGYMRRFWQRGKTKNALIPDFIN | |
| | | SSGKGKIRGDSNKKRGRPKKYSYDPEIGEGVNVTEEDRRI | |
| | | FRIAISRFYNNPKENYFTTAYELMVKEFYKEGIRYDENGV | |
| | | RKSILTPTEKIPTITQFKYWYQIEQYDVTKTLTSRIGAKR | |
| | | FALENRAILGTSKMETIGPGSRYQIDATVGDVYLVSKYNR | |
| | | NWIIGRPVIYVIIDVFSRMITGFYVGLEGPSWIGAMMALT | |
| | | NVAADKVMLCQEYNIDIAEEQWSCNQMPDAILGDRGELAG | |
| | | MAVEPLIPNLYVRIENAASYRADWKGLVERHFRIIHEYVK | |
| | | PFLPGYVDTDFRQRGARDYRLDSKLDIDQFAEIIIRLIIF | |
| | | HNNKPLNEYERDEAMIADDVPPIPRELWKWGIANRSGRLR | |
| | | SFPEDIVKLNLMPTEKATITAKGIKLRGKDMYYSCDQAQK | |
| | | EQWFEKARSNMLSKSEKSLIVSYDIRNPNFIYLPLEDGRN | |
| | | FKKCYLIDPEGRYINKNFYDIEYMLAYEELQQQKTQGKTL | |
| | | QEKVDLIADIEHIVSKAENMTEAAQDEPLSKSKKVAGIRE | |
| | | NRAFEKAKRRENEGFELAKTETPTSTEAVETNNESLKLPK | |
| | | SLQPNHLDILKQKRLERKRGRKE | |
| | TnsC | VDGKNEREWVEIPNGDWAAIAKYSDHKLPEYNINPLVQAL | 434 |
| | | PPILSRDEFLERVTEVPDYDSVETELEPQYRFHCIERLSR | |
| | | YFDPQNKTIELQKVIAVLIMQGYIARNILKPEYTRRSRQI | |
| | | YDAIKDGGGKTLENYVYVPTSASGLTLIGPSGMGKSTNLL | |
| | | NILSLYPQVILHPEYTTFQIVWLKVDCPRSLKGLCTDIFL | |
| | | AVDRLLGTSYFKKFGSRGNSEDYMLAQVAQIAHTHHLGVL | |
| | | VIDEMQNLVNARRNRDDLLNFLVKMDNTIGVPVIRVGTNE | |
| | | AFPILQGNFRNARRGTGQGSVIWERMLQNDDWDFFLTGIW | |
| | | EYQWTKTPVDFSDEINEAFYYECQGIIDIAIKLYKMIQWR | |
| | | AISLGGDEKITVDLIHQSAKDGLYLVKPMLDAIRSGDQDW | |
| | | MIKYKDIAPIDAIEYKNKCLSELESRDLEEVRRLARKQQS | |
| | | RGNQSVKLRHIIIELVKLDVEPSVAKECAEKVLAINEDNA | |
| | | DIPSLVKEAYIYALQGEPVKKGTAKTNIRKTKPKYQSNDI | |
| | | RQIVENAKNKKIPAYQDLKAADIIKNPLQDFINIE | |
| | TniQ | MLSFFPQLYPDELLYSGLARYHIRSGNTSFRQTEIELFGY | 435 |
| | | YSQQICRVILPSNLNYLVNNLPLRSKQTVENIIQNHSLYP | |
| | | FYATFLIPQEAWVVRESMKKKLNGSILEMAKVAFNSTDRA | |
| | | KKFLKFCPICMEEDTQKFGEGYWHRFHQIPGVMVCSVHNS | |
| | | ALYDSSVIVETRNTHYHAASPDNCILNTNTRKYTEETLRN | |
| | | LIVLAREVEWLISNNMDFKGLAWLRSQYKHYLVNKKLITL | |
| | | FPGSKFIFKEKDFSKSIFQFYGKDFFETINQNCIKNPDKY | |
| | | FSNCLLACDINPVIDRIIHILIINFLANSLENFFR | |
| | Cas6 | VCLVQQDMVKEMSSYFSLPTQTPITETLTQTYPKETLTPK | 436 |
| | | LPWVELRFSIIGQTIPVDHGYGLYSAIAHFQSQVHDMDNT | |
| | | LGIHTIAGIPSEDGQIHLTDNSRLQIRLPVDKISLIYPLA | |
| | | GKSLKIGKHTIRLGIPEIYLLEPAERLRSRIVIIQGYQEP | |
| | | ELFLAAAQRQLEKLGIQRKAFITKNTDGSPKRRSIKIKHF | |
| | | TVVGFGLEIINLSDEDSLTLLRYGIGGKRKMGCGVFVPVK | |
| | | RKGNAS | |
| | Cas8 | MSVVASVVNPKIQLNLSDPSITWIHRAGIAGLWMTLKQLE | 437 |
| | | KLYPIPAERPGNLTWLLTPRSISLEWQGQDFVVLDWLLKQ | |
| | | SFQINEEGLISLTGLNTHSINIETQIYIHLGITGTFLQHN | |
| | | QVFKFDRGKSWSLIVDGIEIDVEYKKAVSYAHQHFAKQLC | |
| | | DKQGQLFGESIGVAGWLYPGSVVRHVAFTKKTKFEEKPQL | |
| | | AFALLYAPVACHYFVLRSHTKPEHTQYALVIPEVVDLEIY | |
| | | AQEYWNLGNLDYKDFNVSSLGDAALRYLTYETIIELATPD | |
| | | QVKRCQVILFGTVVWSKQQKTRIEIAVVEATEIIDFIYKL | |
| | | SRISFPEHQIVKYKNKNFIICNLFRGTIANNLVKDFPWWA | |
| | | NLYKIFKHESLLKLITNDGVYKMIQNSEWNLESQKLFIKA | |
| | | CHEALKKIYAKIYGRANEGQYAQIERENTRILSQLGRCTN | |
| | | AENFRKFIAEFWGRAGQLSILEKHWEELLPLTSGIMDWKV | |
| | | ARDLTFIALASYPKSNMVEKQILEISDSNSE | |
| | Cas7 | MFHLFGNILTSYGTAANNRGENEGNITPLQKLNWKGEVHT | 438 |
| | | TISSEAIRWALRYYWQNVGYPVNRHWYENAQPVAAHVLQD | |
| | | PNFDDIRFIDDDILGFMQAEAAKVEASDESGGAAEEASQD | |
| | | DNKKSSKGKDKQTSPRKGKQKPKGKITARRGVLEVTRAVS | |
| | | MIPFTGDITFNAVSGVKGRNSLYATEIHATRYQYGFALTP | |
| | | DSLKDKSRIHPVLDGLISIGEVAGNHARFLYDFSPESIVL | |
| | | RWTHDFSPRFLYCFEQDELGNMSVSNLVRQVEVGDIDPKE | |
| | | LWIGGLISQGLEDLGANVFPGVKSAVKALKQVIAEDLQLS | |
| | | SGSD | |
| | Cas5 | VTTIALKVEVPIACFRQSRAREYAETYPVPPPSTVYGMLL | 439 |
| | | SLIGETDRYKHCGTQLAIALLSKPEKSIVIRTFRRFKTKD | |
| | | IHDPKNTKPDYQELLTNVEFVVWVKTDKAKPTLPELLQQA | |
| | | FANPASINRFGGLCLGESRDLVNTVTLLPEKYHGESLWWL | |
| | | VTDEDGSLTLPYWVDHVGSKRTRWQCYELQESQVWQPPDL | |
| | | SWTTIQTS | |
| GCA_00224 | TnsA | MSKGWTLSTIDRRLNNQRGLGVGKQYKPWLTVRDQSSSGR | 440 |
| 5985.1_ASM | | SAREPGWKTGRVHHFHSDLERYAFYMYEFWDQVLDIREQF | |
| 224598v1_ | | PMFDVELAMTIAKEQGMQNFRDPKTKVPYIYTTDFMLTMN | |
| genomic\|NOLK | | LHGQEVNVARAVKSHQQLNKRSVRNRLLLEQRYWAAKGIE | |
| 01000049.1\| | | WQLVTEQVISKVFAKNVEWVHNAYWLEPTRDLNISELLEL | |
| 56922\|Nostoc | | AKVLKLMLRDNDSTVTKITTRLDKENDIERGTSLYLFKYL | |
| | | VAKKEVIMDMFETQIFKSPSTRLIKKIVF | |
| | TnsB | MEENLYVNDLIEWELDSGNKVLERILWIDEDYTIAFLIDV | 441 |
| | | NTNKGLPKLKKVSEIVEEISNRLAFKQRVDPWARVIREED | |
| | | LRDTEKVIRDKAWNIISELVLEEPLIYERKARGSLVQDAI | |
| | | GKYNAREDNNKLIPKTVYGYLRKFWQRGKTKNSLIPDYIN | |
| | | CGGRGKTKAYSEVKRGKPRTYKHINEIGEGINITEEDKRC | |
| | | ILIGIDRYYKKKKKNIS | |
| | TnsB | MKFNLIPRSQQPTYTQFKYWYNIEFEQDVKTSIISRKGSK | 442 |
| | | AYALKHRPILGTSKSETPGPGSRYQIDATVVDVFLRSVYN | |
| | | INWIIGRPIIYVVIDVFSQMIVGVYVGLEGPSWIGAMMAL | |
| | | TNVVTDKVKFCKEYGIEISEDQWPCKELGDCILGDRGELI | |
| | | GMPPEDTLSPNLYIRIENAASKRGDWKGLVESRFHILHHE | |
| | | TKPFIPGFVDQELKQMTGIDYRLRSRLNIDSFTGIVINLI | |
| | | ISHNNRRHNRYQRDTDMIADDVLPIPTELWKWGIVNRSGR | |
| | | LKSYDEDVVKLNLLPIIKATITSQGIKLNGKLNNLFKLKG | |
| | | NYLYYTCEKAEKEQWFTKARSGLLTQEEKSIAVSYDIRKP | |
| | | NFIYLPSRDGRSFEKCSLIDPEEIYSNKSFYDIDYKLTKE | |
| | | DVEKQETQGEELQKEIDVTVDIENIVNTAEDNFKLDQDNT | |
| | | ITKTQQIAKIGENRKNEKNQRREDEGFELQRTQSESISDS | |
| | | KDEVQTKDTSSNKLLVPDYSNILEQNREGRKRGRSN | |
| | TnsC | VDEAINFKIYHEWDWKALPNGGLIAIARYRQHKHTEYNLN | 443 |
| | | PLIQTLPEIISNQEFLNKVTLEPDLSDEEIIGEAHDRFHC | |
| | | VERLSDFYFEPLGKTVSLYRLVSTLIMRGYLHRNPLVSEY | |
| | | AKRSREINEAVQDGNGTNILKYISLRISASALTLIGPSGM | |
| | | GKSTDIKRILSLYPQVIVHPNYKIYQVVWVKVDCSSIGSL | |
| | | KGLCSDIFFALSRILKDEKYQKYAVPRNSVDYMLAELAQV | |
| | | ANTINLGVLVIDEMQNLANTKTNENDILNYLVDLSNTIGV | |
| | | PIIRIGTPEAKPILMGNFRNARRGGECIEWHRLTRATNKQ | |
| | | DDSWKKTDFYYLITGLWVYQWTKTSVKFEKEFYDTFYNCS | |
| | | QGIIDITIKLYKMVQWKAIAIGGEEEISVELINKVAAEGL | |
| | | ILVQPMLDAIRSGKQEDIEKYKDIALPDEYVTNYREKCIS | |
| | | ELIGRQQQEIRDSVRRQQGRKSILPKVRAITTELLKTEKL | |
| | | GLDFDKAIEYAEKVVNSSKEDNDILTLIKKAQILALDGDS | |
| | | VKTSKSQESIQSKSSSKPATNKKRQAAKKTNKKQNLSGNS | |
| | | QSDEGLETLNQFISDDITKIQ | |
| | TniQ | MLNGFPRIYPDELLYSVIARYHIRNAYKSFHQSDMELFGY | 444 |
| | | ASQQIYRVVLPCNLNHLVREIHLHLFYELNINDLIYHHTL | |
| | | YPFYASFLPPQEAWLLKNYMEQKANVSLSEILKCPRNNKE | |
| | | EAKTFLKFCLYCIEEDTQKYGEPYWHRFHQVPGVIVCPIH | |
| | | RIALNNSLVSIETKEIHYHAPSDDNCPLNTSTTIYNDATL | |
| | | QKLLVFANNIEWLINNNFTFKGLSWLRSHYKTYLTNKNFI | |
| | | TVFSKDKFIFHEQEFYNAVLTYYGQEFLEAINPKIIKNPE | |
| | | KYFSNCLLACDVNPVIDRIIHILIIKFLANSIEDFFKA | |
| | Cas6 | MAIDYRLTVDNCYKETLACTNRKEFLTCQLQLIYADLSFR | 445 |
| | | AIGQIIAIDHCYHLYSGISKFQPKLHDSKVVRICRITGNP | |
| | | DKFGKLHLNQNSRLRIRLPVDKIPLFYSLAGKSLRIGEDT | |
| | | IRLSIPQIELLQPTEKLRSRIVIIKRCQEPRSFLKVAQRQ | |
| | | IEQLGIKGTVNIQANFDGTPKRRTIKVKESTLVGFGLEVK | |
| | | HLSEEDSLILQAYSIGGKHKMGCGFFVPLK | |
| | Cas8 | MSIAKSSVKSRIRLNLSDPSLTRLHIAGVAGLWMTLGQLE | 446 |
| | | KLYPESAKRPSNLTWSRTPHSISLDWDGEEDFIVLDWLLK | |
| | | QSFKISDEGLIDLPGVNSQTGNIQTKIIKHLGIRGTFLQH | |
| | | NKSFKSAGNVSTVLIDEMEAIVLYKKVDEYAHQVFAKHLC | |
| | | NKQGQLLQEPIGIVGWLYPGAVIRHEVFREETKFHEKPEL | |
| | | ALALLFAPVACQYFVLGSHLEREKPHFILVIPQVTDLEAY | |
| | | AQHCWNLTDLDFDYFHASSLGDAGLRFLTYETNVQQTAFN | |
| | | PVERCLVILFGKAAWSKQQKTRTETAFLQASETVNSVYKL | |
| | | SCIFFPNYQNFKSKNETPIIANILRGIIADNLANSLPWWF | |
| | | NLSTKVQDNYLLELSNDDNQGIYKMISNSQWDIETQKLFI | |
| | | KCVHETLKIRYAKIYARTKEDEYVQIERENIRIVSQLKRC | |
| | | TNAVNFRKFIAEFWGKTGHNPILQEHLDEILSITSGIMDW | |
| | | KIAKDLTFIALASYPKIKTTESNI | |
| | Cas7 | MFHLFGNILTSYGTAANNRGDNEGNVTPLQKLDWKGEVHT | 447 |
| | | TVSSEAIRWALRYYWQNFGYLVNRRWDENAQPVANHIMQD | |
| | | HNFDDIRFIDDDVLGFMQAEAAKMEASHESEGESEGASQD | |
| | | NNKKNSKGKDKQTSRRKGQQKLKGKITARRGVLEVTRAVS | |
| | | MIPFMGDITFNAVSGIKNRNSLYATEIHATRYQYGFALTP | |
| | | DSLKDKSRIHAVLDGLISIGEVAGNHARFLYDFSPESIVL | |
| | | RWTHDSSPRFLYCFEEDERRNITVPDLVRRVEAGDIDPKE | |
| | | LWIGGAISKTLEDLGANVFPGVKALVEALKQVIAEDLQLA | |
| | | LRS | |
| | Cas5 | MTTIALKVEVPVACFRQSRAREYVETYPVPPPSTVYGMLL | 448 |
| | | SMIGEMNRYTHCGTQLAIALLSEPKKSTVIRKFHRFKKLD | |
| | | INDPSNIKPDYQELLTNIEFVVWIIAGTDKSKPTLPERLH | |
| | | LALTNPASINRFGGLCLGESRDLVNSVSFFSEKYEGESFE | |
| | | WLVQNEEGLLTLPYWVDHVGSQGTRWQRYMLQKSLGRQPP | |
| | | ELSWTVIQTA | |
| | end1 | ACGCTCTCTACTCCTGCGGTGACAAAATTAAAAAGTTAAA | 449 |
| | | CAATAAGCCTAAAAGCTTTACGATATAAGGAAAAGTATTA | |
| | | GAAATTGCTTTTTTTTAGATGGGCTTTATT | |
| | end2 | TGTCAACTATAGAAATATCCATACAACATCTGTCTACTAT | 450 |
| | | GTAAGAGGTTGTTTGAAAATATTTAGGCATCAAGATATTC | |
| | | CTCTATTTATTTAGATTAATAACAAATTAGAACAGCTATC | |
| | | CTTTATTTAAAATTAGAAATTTTACTGAATTTAATTAATT | |
| | | TTTTGGTAAAATTAATTAAATTCTACGGTTATCATTTGAT | |
| | | CATAAAATAATACACCCAGGTTGTAATATTTTTTCAATTA | |
| | | ATCCAACCAACGTAATAGTCTATATTAGTTAATAGTCTAT | |
| | | AAAGCTATAACCGTTGCTAAATAAGCTTTACATGGCTTAC | |
| | | GCTTATATAATTTATTATATATTTTTATGATTATTGATAA | |
| | | TAATATACATCATAAAGTTTCCAAATGAAATCTTTTAATT | |
| | | TGTACATTTTTTAGTATTGAAAATATTTACTGCAATAAAA | |
| | | CAATTTTTCTATCAAGTATTAGAAGTAAAAGAGTTGACAA | |
| | | AAAATAATAATCATGATTTATGCAAGGTAAGAAATGATTT | |
| | | AAATTTACACTACTGACATCAGATCCTTATCCAATAAGCA | |
| | | TTTGAGCAATCTCAATTTGATAGTACTATCAGAAAAGTTG | |
| | | CATTATTTTCCTGTCTTAAGTATTAGGATTATTACAGACT | |
| | | ATTAACTTAGCCTAAGTTAACTTTATACTCAGTGTTTGTT | |
| | | CAACTGAT | |
| | CRISPR | AACGCCTAAAGACATCTTATATTGAAAAGCTAAATCAGCA | 451 |
| | array | GGAGTGAACTTAATCACAATTTTCCGTTTATAAACGCCTA | |
| | | AAGGCAATCTAATATTGAAGCAGGGCAATAGTTGCCAGTT | |
| | | ACAATTTACGATCTCTCTCGTGATCAACGCCTAAAGGCAA | |
| | | TCTAATATTGAAGCAGGCATAACAATAATCAGGGATTGCG | |
| | | ATCGCAAGAACGTGATCAACGCCTAAAGGCAATCTAATAT | |
| | | TGAAGCAGTACTTTGCCAGTGTTCCAGAAATGATAAAGGC | |
| | | TTTGTGATCAACGCCTAAAGGCAATCTAATATTGAAGCAG | |
| GCA_01074 | TnsA | MVRGRREWTQAKYERYIKEGRGRGSGKNYKPWLTIQDFPS | 452 |
| 7425.1_ASM | | KGRSSRIPGWKTNRVHHFFSDHEKRLFYLFEWSDIVTDIK | |
| 1074742V1_ | | EQFPLDNLDLAMSIATDIGIKYPVDTQTGTPYVLTSDFML | |
| geneomic\| | | TVNRNGKQIQIARTVKQSTELEKKRVNEKLEIERQYYLAK | |
| jaag)g010000 | | GIDWGIITEKEISRLLAENVEWVHSAYRLEANSEMDTSQL | |
| 020.1\|67678\| | | HELSTILKSKLQEEDATINKITTTLDKEMNVNYGTSLYVF | |
| Nostoc_ | | KHLIARKELIVDLVKIKLSACPSTEVIQKIVF | |
| sp._UIC_ | | | |
| 10630_53_ | | | |
| length_ | | | |
| 67678_ | | | |
| cov_46.273/0, | | | |
| _whole_ | | | |
| genome_ | | | |
| shotgun_ | | | |
| sequence | | | |
| | TnsB | MVKGLFVNDLIEWTLDLNVHIVERIIWIDEGYIIAFVIDI | 453 |
| | | NAKKGLPEPKKISEILEAISEGIAFKQQQDPWARIVRDEN | |
| | | LTDREKEYRNKAWKIISSLVTEEPSIYYRNFRGSLVKKVV | |
| | | EKHNLERNKDKLVEKTVYGYLRRFWQRGKNINALIPDFIN | |
| | | SSGKGKIRGQSSNKRGRPRKYAHEPDIGEGVNVTEEDRKI | |
| | | FRIAISKFYNNSKENYLTTAYELMVKNYYKEGIRYDENGV | |
| | | QKSILIPADKIPTITQFKYWYQLEQDDVTKTLTSRKGAKK | |
| | | FALENRAILGTSKMETIGPGSRYQIDATVADVYLVSKYNR | |
| | | DWIIGRPVIYVIIDVFSRIITGIYVGLEGPSWMGAMMALA | |
| | | NVATDKTLFCQEYNINITEDEWPCNQMPDTILGDKGELAG | |
| | | MSVETLIPNLYVHIENAASYRADWKGLVERHFRIIHEYVK | |
| | | PFLPGYIDTDFRQRGARDYRLDGKLDIDQFTEIIVRLIVH | |
| | | HNNKPLKEYERDEAMIVDDIPPIPTELWKWGITNRSGRLR | |
| | | TFSEDIVKLNLMPTEKATITAKGIKMRGKEMYYTCDSAEK | |
| | | RQWFEKARSNLLSKSDKSLIVSYDIRNPNFIYLPSSDGRD | |
| | | FEKCFLIDSEGRYANKNFHDIEYLLAYEELQRQKSQGKQL | |
| | | QEKVDLIADIESVVDRAGKMTDAAKEPNLSKTKKLSGIRE | |
| | | NRAFEKAKRRESEGFELANTENQNSFQAVESKLETSEQPE | |
| | | SLQPNHLDLLRKNRQERKRGQE | |
| | TnsC | VDRNEGELIRIPNGELAIVARYIDQKLPEYNANPLIQALP | 454 |
| | | PILSAKEFLNKATRTPEFHEEEKELEAHYRFHCIERLSRY | |
| | | FDPQNKTVELQKVICALIMTGYLARNVLKPEYASRSRQIY | |
| | | NAIKDGGGKNLENYVNLPTSASGLTLIGPSGMGKSTNFQN | |
| | | ILNLYPQVILHPDHSVYQIVWLKVDCPHAGSLKGLCTDIF | |
| | | LAVDRLLGTNYFKKFGSSRNSEDYMLAQVAQIAHTHHLGV | |
| | | LVIDEMQNLVTARRSSSDMLNFLVKMDNTIGIPVIRVGTN | |
| | | EAFPILQGNFRNARRGTGEGSVIWDRMVNNDEWSFFMEGI | |
| | | WEYQWTKTPVPFSDEINEVFYNESQGIIDIAVKLYKMAQW | |
| | | RAISIGGKEIITTNLIRQAAKDGLYLVKPMLDAIRSGDKE | |
| | | WMIKYKDIAPLDTTEYQNKCLSELDSDDLKEIQRLARKQQ | |
| | | NQQKVSPKLNYVILELLKLEVEAARAKECAEQVIVSGDEN | |
| | | VDITFLVNKAYALALQGGQENGNLVKISKNKAKFKPKYVE | |
| | | NDIRRTVENAQKEKKSAYEGLKLAGIIKDPVEDFINMSHI | |
| | | DA | |
| | TniQ | MLSFFPTLYPDELLYSALARYHIRSGNKIFKQTDLELFGY | 455 |
| | | SSQQVCKITLTNHLNYLVKNLPLRSHQTVGNLLQNHTLYP | |
| | | FYATFLIPQEAWLLKDSMSKKLSGSILKLAKVANGSSGES | |
| | | KKFLKFCPQCLEQDTHQYGEPYWHRTHQVPGILVCPTHGV | |
| | | FLCDSSVAIESKGIHYYAASLDNCLTVTGLKSLTNQALKT | |
| | | LVTLANDINLLIHGNFAFKGLAWLRAQYQHYLVSKGLLQI | |
| | | FPAGKFKFDEYGFSKLIFDFYGQESLEALNPKLTQHQGKY | |
| | | FSHCLLGCDLNPSIDRITHILIIKYLANSIEIFFL | |
| | TnsD | MLGFFPAPYPDEILYSILARYHIRSGNTSPKITLRELFNS | 456 |
| | | QDVIATVDLPSNLNSLIENLQFISNYQIEDLIYKYTLYPF | |
| | | YSVFLPSKRASQVMESMKADFGGDIHTRTGIMASSLKMQR | |
| | | YLRFCPKCLEEDLQNYGESYWHKLHQTPGVLVCLVHGVTL | |
| | | QDSTIPMQGFNRHEYYAASLENCPVIPIQETYSQETYSQE | |
| | | TLKKLRLLAQDISWLINSNLFSRELEWFQRKYIALLIEKN | |
| | | FATATGRVNQKRLLDNFLFFYGAEVLEAVNSMVNYENEQN | |
| | | WLFSIVRKHRKSFHPIRHLLVIRFLTNSIEEFFNTDYQYK | |
| | | PFGEGPWLCLNAAVNHYLKPVITNLVVTHCLDNKKPLGTF | |
| | | SCSCGMVYCRTGPDETDEDKQRIGKVLTYGQFWEQKLKEL | |
| | | VEIQELGLRETARQLKVDSRTVKHYTAILKLKTFWKSSQK | |
| | | NQLVDSQEVLDSNLNLASDDRIKYREVWKALQQQYPEASK | |
| | | TTLRGLAKGTYIWLYRNDKEWLNKNSPSLKVPLPCVGKVD | |
| | | WAERDKQVLEKVKTAVRTFLSAEKPARVTICRIGKSIGLL | |
| | | ALLEKHLAEMPLTKVYLESVTETVEDFQIRRIKWAIKRLD | |
| | | DCGEEIQPWKVIRLAALRENRSQRVQAALETELYKQPD | |
| | Cas6 | MIIDCSLPTQIPPESPLNLTKQRKLLTSELPYIELIFNLI | 457 |
| | | GETVPLDHGYELFSAIAHFEPELHKLDTVGIHTIAGIPKP | |
| | | GVIQLTKNSRLRIRLPMDQVRLVYPLAGKPLRIGKHTIRL | |
| | | GIPEIYLLEPAEKLRSRIVIIQGYQEPESFLTAAQRQLEQ | |
| | | LGIQGKAFITKNTDGSPKRRSIKIKRFTVVGFGLEIINLS | |
| | | NEDSLTLLRYGIGGKRKMGCGVFVPVKRKGNAS | |
| | Cas8 | MSIVASVVNPKIYLNLGDPSITWIHRAGIAGLWMTLKQLE | 458 |
| | | KLHPIPAERPGNLTWLLTPRSISLEWQGQDFVVLDWLLKQ | |
| | | SFQINKEGLISLTGLNTHSIKIETQINIHLGITGTFLQHN | |
| | | QVFKFDGGKSWSLIVDGIEIDVEYKKAVSYAHQDFAKQLC | |
| | | DKQGQLFGQSIGVAGWLYPGSVVRHVAFTKKTKFEEKPQL | |
| | | AFALLYAPVACRYFVLRSHIKLEHTQYALVIPEVVDLEIY | |
| | | AQEYWSLGNLDYKDFHVSSLGDAALRFLTYETIIELATPD | |
| | | QVKRCQVILFGTVVWSKQQKTRIEIGVVEATEIIDFIYKL | |
| | | SRIYFPEYQIVKYKNKNLIISNVFTGTIADNLVKGFPWWA | |
| | | NLYTTFKNKNLFKFITNDGVYKMIQNAEWNLESQKLFIKA | |
| | | CHEALKKIYAKIYGRTNEGQYAQIERENIRILSQLGRCTN | |
| | | AENFRKFIAEFWGRAGQISILEKHWEELLPLTSGIMDWKV | |
| | | ARDLTFIALASYPKSNMVEKEILEISDSNSE | |
| | Cas7 | MFHLFGNILTSYGTAANNRGENEGNITPLQKLNWKGEVHT | 459 |
| | | TVSSEAIRWALRYYWQNVGYPVNRRWDENAQPVADYVLQD | |
| | | PNFDDIRFIDDDILGFMQAEAAKVEASDESGGDAEEASQD | |
| | | ENKKSSKGKDKQTSPRKGKQKPKGKITARRGVLEVTRAVS | |
| | | MIPFMGNITFNAVSGVKGRNSLYATEIHATRYQYGFALTP | |
| | | DSLKDKSRIHAVLDGLISIGEVAGNHARFLYDFSPESIVL | |
| | | RWTHDFSPRFLYCFEQDELGNLSVSNLVRQVEVGDIDPKE | |
| | | LWIGGLISQGLEDLGANVFPGVKSAVKALKQVIAEDLQLS | |
| | | SGGN | |
| | Cas5 | MTTIALKVEVPIACFRQSRAREYAETYPVPPPSTVYGMLL | 460 |
| | | SLIGETDRYKHCGTQLAIALLSKPEKSIVIRTFRRFKTKD | |
| | | IHDPKNTKPDYQELLTNVEFVVWVKTDKAKPTLPELLQQA | |
| | | FANPASINRFGGLCLGESRDLVNTVTLLSEKYHGESLWWL | |
| | | VTDEDGSLTLPYWVDHVGSKRTRWQCYELQESQVWQPPDL | |
| | | SWTTIQTS | |
| | end1 | UAGUUUAUUAAUAGAGGUAGUAGCUGUUGUGGAGGAGUAA | 461 |
| | | UUCGGUUCAACAAAAUAUAAUUCGGUUCAACAAUUCAUAA | |
| | | AACGAUUGAACAAUAACCUCUAAAGAAGUACGAUUGUACC | |
| | | AAGUAAAAGU | |
| | end2 | UUGUACAAUCAUCUGAGUAACCUCAUUGAUGGGGUUUAAC | 462 |
| | | AAAAGUCGAUCGCAGUCUCUUCCCGGAGGGCGAUCGCCUU | |
| | | UGUCUUGUUACUAUAUUGUAGUUACCUGUUAUUACUAAAA | |
| | | CAAUAGCGUUACUACAAAAUUUUCAAAAUUCGCCACAAUU | |
| | | AAGGUAAAUAGAGUUAUUACAGAUUGAAAGUUUUCAGCAG | |
| | | AAAGUAGUAUGGCAAAGCGGCAGACAACAAAAUUGAGCAA | |
| | | UCAGAUCAUUGUUAGAAUGGACGAUGAGACAAAGGAAGCU | |
| | | UUUAUGAAUAAAGCUAAGGCUGAAGGCAAGACAGCCUCAG | |
| | | AAUUGAUCAUGGGAUGGAUUCGUUCUUACAUGGCUGAAGA | |
| | | ACUCCAAGGAACUCCAGACUUAGCCAAAAUGCAAGCGGAC | |
| | | UUGGAGAAUCUAAAACAACAAGUUGCUGCACUCCAAAAUG | |
| | | AAUACUUGGGAAAAUUAGCAGCCUGAGAGAAGAGAACGAU | |
| | | UCUCUCAGGCUAUGGAUAGAUCAAAUUAUCAGUUCUGCCC | |
| | | CUAAGAACCCAAAAAACCCGUCAGAUGCCUGACGGGUUUA | |
| | | GUUUUGUUAGGGAGAUUAACUAUGGGAAGAUAUGCAGUUA | |
| | | CUACGAGUAAUAAAUAGGUAGUAACUAAAUUUAAGAUUCC | |
| | | GAUCGCACUCAAAUCCGUUAACCCAUAAGACUUU | |
| | CRISPR | UGCUUAACGUCUGACGACAUCUAAUGUUAAAGAAUACUGU | 463 |
| | array | ACCAAGGGUUCCCCUUACCCCAUAUCCCAUUGUUCAACGU | |
| | | CUGACGACAUCUAAUGUUAAAGAACCUUCCGAUAGUAAUC | |
| | | CCAGGUUUGCUGAAUAAAUUCUGCUCAACGUCUGACGACA | |
| | | UCUAAUGUUAAAGAACCCCUUUACGUAAAAACUCUGGGGG | |
| | | CAAUUUGGAAACUGCUCAACGUCUGACGACAUCUAAUGUU | |
| | | AAAGAACAAGAGCUUGAUAAAUAGUAUUAAGUUCAACUAU | |
| | | CACUGCUCAACGUCUGACGACAUCUAAUGUUAAAGAACUA | |
| | | AUGUUUCCUUGAAUUCCCUCAAUUUGGCAUCAACUGCUCA | |
| | | ACGUCUGACGACAUCUAAUGUUAAAGAACACGGCGUUGAG | |
| | | UGCGAUCGCUGAAAGCCUACCGUCUGCUCAACGUCUGACG | |
| | | ACAUCUAAUGUUAAAGAAC | |
| GCF_002368 | TnsA | MARTKQEWTQAKFERYMKEGRGQGSGKNYQPWIKIQDFPS | 464 |
| 215.1\| | | KGRVSRPPGWKTNREHHLFSDHEKRLFYLFEWSDSIIDIR | |
| NZ_AP | | EQFPLIDLDLAMNIATEMAIEYPKDVNNNTPYVLTTDFML | |
| 018184\| | | SVKQGKQIVEKARTFKLVKDLGIKSVAEKFELEKRYYTAK | |
| Nostoc sp. | | GIDWGIITEKEIPTLLVKNVEWIHSSYKLEAAAEINVDEL | |
| NIES- | | NNIANILKSKLQESDSTINKITNCLDKEMNLEIGTSLYIF | |
| 2111 DNA, | | KHLLANKKIIMDMQTNAISSSISAREIQKIIF | |
| nearly | | | |
| complete | | | |
| genome. | | | |
| | TnsB | MNNNLFVNDLIEWIDESGNNFVERIIWIDEAYIIAFTIDI | 465 |
| | | NIKTGFPVSKRVSDIQEAIYEGRALKLRTDPWARIVRDED | |
| | | LSAKEKEIRDKYWDIISSIVIQEPSIYYRDKRGSLIKQVI | |
| | | EKYNNNKSEGKLIERSVYQIIRRYWQRGKDKNSLLPDYAN | |
| | | SGGKGKVRASREKKRGRPRKYAHEPDIGVGINITDEDKKI | |
| | | FRLAVTKFYHNQKENFLTTAYDLMIKNYYSEETIYDENGV | |
| | | KKHILIPPDKRPTLTQFKYWYDVEQGDIRKKIISRRGAKK | |
| | | YALEHRAITGNSTMETIGPGSRYQIDATIADVYLVSAYNR | |
| | | NWIVGRPVIYVVIDVFSRMITGVYVGFEGPSWIGAMMALA | |
| | | NAASDKVAFCKEYGIEITEDEWACHHIPDAILGDRGELAG | |
| | | MAVETLIPNLGIRIENAAPYRADWKGLVERHFGIIHGHIK | |
| | | PFVPGYIDKDFRERGARDYRLDSKLDIEQFTEIIIKIILY | |
| | | HNNEHYLDNYERDEAMIADDVPPIPRELWQWGIANRSGRL | |
| | | RTIPEDIVKLNLMPTENATITERGIKFKGMYYTCQKAKNE | |
| | | FWFEKARSNSLSRLEKKLEISYDIRKPDYIYLRSPDGRNF | |
| | | EKCFLLESESKYFNKNLHEIEYLFAFEELQKQKNKGLKQQ | |
| | | QKVDLIAEIESVVNKAKKMTEEMKDDKLSNRKRTAGIRDN | |
| | | RSAEKSKRRKIEGFELEKSDHENTSNTVDIESQKVEQPQS | |
| | | LQPNYLDILRQKREERKREQDK | |
| | TnsC | MNKINDWKWVEIPNGKSAAVAKYNDHKLPEYNNNPLIQAL | 466 |
| | | PPILSGEEFIEKAIILPSYAPEEREMDAHRRFHCVERLSR | |
| | | YFQPLNKTVNLQQVMCALLMQGYIARNISKPEYARRSRQI | |
| | | YEAIKAGDGRNLDVYVNVPTSTSASGLTLIGPSGMGKSTN | |
| | | FINILNLYPQVILHPEYSTYQIVWLKVDCPHAGSLKGLCT | |
| | | DIFLGIDRLLGTNYFKKFGASRNSEDYMLAQVAQMAHTHH | |
| | | LGVLVIDEMQNLVTARRSCSDMLNFLVKMDNIIGVPVIRI | |
| | | GTNEAFPILQGNFRNARRGTGEGSVIWDRMRNDDEWYFFM | |
| | | ETMWEYQWTKISTDFSDEFNDVFYDESQGIIDIAIKLYKM | |
| | | VQWRAISLGGKEAINANLIKQSVKDGLFLVKPMLNAIRSG | |
| | | DKEWMIKYKDIAPIDTTEYYNNCLSNLETKDLKEISRLAK | |
| | | KQQAENGHLSATQRHIILKLLELDVEPQLAKECAVQVINS | |
| | | GEEDADIPILVKQAYALALGGQVQEATVKKVRTHTLKAKP | |
| | | KYQINDIRQIAEKAKKNQTSAYEGLKSTGIIKDPVQDFIT | |
| | | IT | |
| | TniQ | MLSFFPTLYPDELLYSALARYHIRSGNKTFKQTDLELFGY | 467 |
| | | SSQQLCKVTLTNNLNYLVKNLSLFSQLTVSDLLQNHTLYP | |
| | | FYASFLIPQQAWQLQDSMRKKLGGSILEVAKVANHSADNS | |
| | | TKFLKFCPICLEQDTQEYGEPYWHRIHQIPGILVCATHRV | |
| | | VLHDSSVAVDSKGIHYYAASPENCLTNQNQVKCADNTVEK | |
| | | LLILAHDIWNISTINIPFKGLTWLRNQYQSYLINQKFMTL | |
| | | LPGEKFRFNEKSFSNSICDFYGQEFLEIINPNLIRNPDKY | |
| | | FSGYLLACDLNPVIDRITHILIIKFLANSVEIFFT | |
| | TnsD | MVSFFPKPYPEEILYSVIARYHIRSGNTSPKITLQELFNS | 468 |
| | | QTTVATVDLPSNLNNLIQNLQFISNYQVEDLIYKHTLYPL | |
| | | YSPFLSANRSSQVLESMKGDYGGDIHTRAGIMASSITMPK | |
| | | YFRFCPTCLEEDLKTYGEPYWHRIHQIPGVLVCPFHAEVL | |
| | | QNSLVPLHGFNKHEYHAASTDNCSITKESTFFSTDILKKL | |
| | | LLLAKDFWWLLNSEIPCQEPQWFRKQYTNLMIEQRLATAT | |
| | | GRIYQKRLLDNFLFFYGREMLSAVDSMVNHNDSNNWVTSI | |
| | | VRKHRKSFHPLRHLLIISFLKTSVEEFFKQDTEYKPFGES | |
| | | PWLCLNAAAEHYLQPVITSLDITLCCDTKKPVGTFSCSCG | |
| | | MIYCRTGPDETDEDKLRIGKIKTFGQLWEQKLKELVEVEK | |
| | | LGLRETARRLNVDARTIKRYVSRLRLTTYWQTRKENDSVG | |
| | | LQELPEIDPNFATELKLKHRQNWMVLQVQNPEASKTTLRK | |
| | | LAPATYIWLYRNDREWLNQNSPALQVAVPSVVRVDWHERD | |
| | | QQILTQVQDAVRSLLNAEIPEKISISRVGKTIGLLALLEK | |
| | | HLDQMPLTKAYLESVVETVEEFQMRRIKWAIKLLDECGEE | |
| | | IMRWKVVRVAALREDCSERVSAFLESELEKAYKKER | |
| | Cas6 | MGDNFHVSTQSHATEVLNPQLIYVDLSFRVIGQTLPIDHG | 469 |
| | | YALYAALTHLQDKLHSLDDLSIQTIPGIPDGNDSLHLNNH | |
| | | SRLRIRLPVDKIPLVYPFAGKSLTIGRHKIHLEIPQMYLL | |
| | | QAVEKLRSRIVVIKGYEEPKGFLAAAQRQLEKLGVQGIAS | |
| | | IPTKADGKPERRSIKIKKFTVVGFGLEVTNLNDEDSITLQ | |
| | | KYGVGGKQKMGCGVFVPVNEKR | |
| | Cas8 | MINTTANSKIQLNLSDSSTTLLHRAGIAGFWMTLKQLEEI | 470 |
| | | YPNPAQRTGNLTWVLTPHSISLNWEGQDFAALDWLLKQSF | |
| | | QISDEGLIFLTGLNPKAIHIERQIIIHQGITGTFLQHNKF | |
| | | FKFSDKKLKSIIVDGRQFVTEYKSAMSYAHQHFAKKLCDE | |
| | | SGQLLQEPIGIVGWLYPGAVVRHSAFPKQTKFEEKPEYAL | |
| | | ALLFVPVACHYFILRSHTKPQSTNYILVVPEVNNLEFYAQ | |
| | | HCWNLSNLSYRDFHVSSLRDAGLKFLTNEAAIQIKQNCVK | |
| | | RCQVFSFGTLIWSEQQKVRTETATLELTEKVSFYYKFSRS | |
| | | CFSNYRIVDYENQHFILTSLVQGIIANNLGLGLPWWNDFG | |
| | | NILTSSNLFNQIADENQGIYMMIQESEWDIESQKLFIKAC | |
| | | HEALKVIYAKIYSRTKENEYAQIERENTKIISQLGRCTNA | |
| | | ENFRKFIAEFWGKAGQLSILEEHWEELLPITTGVRHWKMS | |
| | | RDLTFIAIASYPKSKNIKPESSEISQTSSE | |
| | Cas7 | MSHLFGNILTIYGTAANNRGENEGNITTLQKINWKGEVHT | 471 |
| | | SVSAEAIRWAVRYYWQNNGYEVNRRWDENAQPLADHIWQD | |
| | | TNFNSVRFIDDDVLGFMQAEAARVEAGEQSGGEVQEASAG | |
| | | EIQNVSQDEETASPKGKGKKTSQRKGRERSQGRVTAKRGV | |
| | | LEVTRAVSLIPYGGNITFNAVSGTKGRTSLYGTEVHATRY | |
| | | QYGFAMTPNSLQDKSRINAVLDGLISIGEVGGNHARFLYD | |
| | | FSPDSIILRWTHDFSPRFLYCFEQDEWGTISVPDLVRRVE | |
| | | AEDIDPKELWIGGAIARDLGNLGANVFPGVKKVVEELLKV | |
| | | ITRDLQLPPRSS | |
| | Cas5 | MTTIALKVEVPIACFRQSRAREYVETYSVPPPSTVYGMLL | 472 |
| | | SLVGEENRYTHCGVKLAITLVSEPAKSTVIRTFHRLKTKN | |
| | | IHDPKNNKPDYQELLTNIEFVVWVDPGVDKARPNLVQRLE | |
| | | EAFTNPASINRFGGLCLGESRDLVNDITLLPKNYYAESMR | |
| | | WLIKDEHGLLTLPYWVDHVGSQGTRWLRYELQECQVLQPP | |
| | | ELSWTSVQSD | |
| | end1 | AATCGAGAAATATTGAGGTTGTGGAAACATAATAAAGTTG | 473 |
| | | TACAATAAATAATAAAGTTGTACAATGCCTAATAAAGTTA | |
| | | TACAATTTCTCCTATGGGTGAGTATAATTCCATCTGTAGG | |
| | end2 | CTTCCATATTATCGGCTCAACATGAAATAGAGTGCGATCG | 474 |
| | | CCTCCCTCGAAACTAAACTGTTGATTCAGCTTTGTACTGG | |
| | | GAATGCGATGCGATCGCCACTAAATCTTGGAGTAAATATT | |
| | | CCCAAATCCTTACGGGGAAGTAATTTGCAAAATTGTACAA | |
| | | CTTTTTTATTTCTTTTTGGATAGTAGCCTGATGAAATTGT | |
| | | AGAACTTTATTTTTTCAAGACTTCTTAGTAATCAACGATA | |
| | | TAACAATCCTTGTAGCCGCGCAAATTATACAACTTTATTA | |
| | | TATTTATACAGAGGTTGTAGAGAAATAATTCGATTCAACA | |
| | | ATAAAGATGTTAAAAATAACCTCTAAAGAATTACTAAAAT | |
| | | AATTGCAAATAGAGGTTATTTTTATTGGAACAGAGACAAA | |
| | | ACAGGTT | |
| | CRISPR | ATCTTCAGTGATAGATGCTTGTAAAATTGAACTAGAGCTT | 475 |
| | array | AGGCGAGTCAACAAGTTTGGCGATCGCCGTGCTTCAACAT | |
| | | TAGATGCCATTAGGCGTTGAGCAGGCATCGTGCGGGGTGA | |
| | | GAATTGGGTTTACGAAAATGTGCTTCAACATTAGATGCCA | |
| | | TTAGGCGTTGAGCAGGTAGTTAGTAATAATTAATTCTTTG | |
| | | CCCTTTTTTACTTGTGCTTCAACATTAGATGCCATTAGGC | |
| | | GTTGAGCAGAGTCTAGATATTGCAACATTAACATTCTGAG | |
| | | GGTTCTGTGCTTCAACATTAGATGCCATTAGGCGTTGAGC | |
| | | AGGAAGATTTTAATTATCGCCATGTCGGGGAAATAGAAGT | |
| | | GCTTCAACATTATCAGATGCTGTTAGGTGTTGAGCAA | |
| GCA_00031 | TnsA | MVRSKRDWTEEKLDRYMKEGRGHGIGRDYNPWIKVSDFSS | 476 |
| 7145.1_ASM | | SGRVSRVLGWKTSREHHFMSDGETRLFYLFEWSDRIVDIR | |
| 31714v1_ | | EQFPLLDRELCFKIAEDMGVEYPKDPKSGAPYVLSTDFML | |
| genomic\| | | TVTHKGKNTYEARTFKPSKSLNNKRTAMKLELERRYYAIK | |
| CP0036 | | EIDWKIVTEKDIPKLMIKNVEWIHSSHKLEGNKEANKEEL | |
| 00.1\|6284095 | | HHIIKILRSKLETDTTTVGKVVNDLDIEMNVGLGTSLYLF | |
| \|Chamaesiphon | | KYLVANKLISVDMLTEKSLTFFPTKDLKFN | |
| _minutus | | | |
| PCC_6605, | | | |
| complete_ | | | |
| genome | | | |
| | TnsB | MQVHLFVNNLVEWISEDGKNQIDRILWIDEGYEVAFLINI | 477 |
| | | YEEKSLPRQVFINEIEACIKSSAAIIIKKDPWVLIVLEEE | |
| | | LSSKDKILRDAAWRIISSIVTQEPPIYERNQRGSLVLKLI | |
| | | EDHNTTRSSSEVEGKLTKKTVYKYLKRYWQRGKNINALLP | |
| | | DYKNSGGKGKQKLAGDVKRGRPRKYANDPEIGIGVNVTEE | |
| | | TKMTFRVAISQFYHTSEKRSLVAAYEKMIQEYYSEEDLSN | |
| | | YDDLHGSIAMQDRIPSLVQFKYWYDLEHGQNVEKKISTR | |
| | | IGKREYLQNYRPITGNSTAEVTGPGSRYQVDATVGDVYLV | |
| | | SSYNRKWIIGRPVIYVVIDVFSRMITGVYVGLEGPSWLGM | |
| | | MMALANMAMDKVEYCRQYGIDISEDDWPCHHLPDAILGDR | |
| | | GELISKNANIVTQNLNIKIENAAPFRPDWKGIVERRFRII | |
| | | NEKVKPFIPGAVDIDFNQRGGRDYRLDSKLDLDQFTQIII | |
| | | RMILHHNNQHMLKDYPRTVEMIADEVLPIPAQLWKWGIIH | |
| | | CSGRLRTLDPDIIKLNLMPRGNATITEKGIKFKGIYYTCD | |
| | | RADKEMWLSNARAGSLSRAEKKLEVSYDPRKTDYIYIPAQ | |
| | | DGRSFTQCILIAPDSKYKSHNFYDVGYLFAEEELQRQKSA | |
| | | NRELPQTIDLNKEIEKIVDRAVDMTNAVQDPTMSKLARTS | |
| | | AIRDNRSIEKENRREEESFDLSPKEKDSSKILSKTDPDKS | |
| | | SSISPQPSLKPNYTDLLRAKREKNKRGKN | |
| | TnsC | VEKTDDKITIPQNIDRKHMGVEAIYIDQKLREYNENLLIQ | 478 |
| | | ALPPTFDNEEFIDLVYEEPEYNDDEVCLNKSERFHCVARL | |
| | | SSYFDPQGKTIELNNNISILIKRGYLARNPLKPTFALRSR | |
| | | QIYGAIENSSGRELERYVSQPTSASGLTLIGPSGMGKSTN | |
| | | LHKILSLYDQVIFHPKLSTYQIVWLKVDCPHAGSLKGLCT | |
| | | DIFMAIDKLLGTTYHTKFSSRNHTEDLMLAQVAQLANTHH | |
| | | LGVLVIDEMQNLVNARRRKDDLLNFLVKMDNIIGVPVI | |
| | | KVGTNEALPIFQGNFRNARRGTGEGSVIWDRMQKDDDEWD | |
| | | LFVENLWKYQWTRKKVELSTALEEAFYDETQGIIDIAIKL | |
| | | FRMVQCRSIALDGDEAISVDLIRQVANDGLHLLKPMLAAI | |
| | | RNNDKEEMLRYKDIAPLDILAYEQKCLKKLHELTLRKNKQ | |
| | | LQDHKIDSNLLRATIAELLELDVSPHVAKECAEQVITNNK | |
| | | AEADISVLVKQAYKLSLVGSTGHTSALVKQQPQPKKKKVE | |
| | | PAYQKDDLRQIVAKAIDSNTSAYEDIKSVGLICDPVAEYI | |
| | | N | |
| | TniQ | MCALASFPRLYPDELLYSGLARYHIRSGNQSFRQTDLDLF | 479 |
| | | GYSSQQACRVTLTNNLKGLVKQIAHISDYRVRSLMEHNTL | |
| | | YPFYAAFLSPIEIRKLGSATIEKRSGSILEQARVDLDSTS | |
| | | DRRKYLKFCPLCLTTEIEQYGEPYWHRLHQIPGLVICTQ | |
| | | HRILLLDSSVLIDSHGVHYHAASDENCIVDMEQSELAPDS | |
| | | LKHLLEIATDLVWLVDTRIDFRGMGWLRDRYIAQLCKRGS | |
| | | VKKLLRGEFKFDERELFQSFRDFYDEESLNWIEPRFVDTE | |
| | | GKYLIHCLFAGDLDPKIDRVAHILIIRYLFGSITDFVMSH | |
| | Cas6 | MTILPDRTSEERDCCRSCSEEFGDYLFPVEGQSIGVDHAH | 480 |
| | | PLYGGISQIIPEFHESNSIGIFGINGKLSGAYSKRLNIDV | |
| | | DSVLKIRLPLDLSRSIYKLAGKTLQIHQDKIYLGIPELEL | |
| | | IVPSQNLEARIVTIKGFLDASTLDTAAQNHLDRLEIVGKV | |
| | | RVLTRSDGQPRCRTVKINKKKVVGFGVRVEGLSDLDSLML | |
| | | QQQGIGGRRKMGCGLFTP | |
| | Cas8 | MKSLYSPAHPTKLSKSEFGIAANGWSDAALKFLLKTTVVN | 481 |
| | | QQSQADIHRCLVIPFGKVTWSKQQQTRLAAETIEIETQHL | |
| | | ELYQTFCGESRQDDPLSQFIAENLIRGKPWWWGFTDVFIH | |
| | | KKAYLAIKFRQDRIHDMVKKTEWDTESQELFVRACHQGLR | |
| | | ITFGKIGGKTKEGDYPQFERKVIQLRSNLERCQNASAFRD | |
| | | FITSFWGNAGNIQVLQESWQKLLPLTTGQSDWKMAKSLFF | |
| | | LALASYKGEEKLPDPDKLPAEDPSTAITEPEVRHV | |
| | Cas7 | MFNLFGNILTAYGVAANNRGENEGNISKLQKLLWHGETHT | 482 |
| | | TVSAEAIRWSLRYTWQRQGLPVNRVWNPLILESTWEDPN | |
| | | FDPDKYLDDDILGFMHAEAAKIDDAEEDPEVPPIPAKGRA | |
| | | KGKPKPKGTAVKRRGALDVTPAVSTRPFHGDVTFSARSGV | |
| | | KDRNSLHATERHATYYQSLVTS | |
| | Cas5 | MTINKIALQVEVPIACFRDSRAREYIATYPVPPPSTVYGM | 483 |
| | | LLSTVGEENRFRHCGVKLAIAMLSETAKSRVIRKVRRFKE | |
| | | RDINSSKNSKPDYQEILTGIKFVVWIDAAEDRSILNLAER | |
| | | LHNAMVNPSSVVRFGNICLGESRDLVNSIDLLTNEHQQGA | |
| | | LKWLTQDEYGEITLPYWIDRLGSERTRWLRYRLIKSVDWK | |
| | | PPALSWTQIQTD | |
| | end1 | AAUAAUUAGUUUAGUUAUUGUGAUAACACUGUGAUAACAC | 484 |
| | | AAUAAAGUCGUAUACUAAAUAAUAAAGUUGUAUACUGACU | |
| | | AAUAAAGUUGUAUACUAUUGUCUGUGAGUGUUUACUUAGC | |
| | | AUUUGCAG | |
| | end2 | UUCACUGCGAGCAAGACAUUAGUCGUAUUUUUGACACUUA | 485 |
| | | ACUGAGAAAAGAUUGAGCUAGAACCUAAUCAGAGCAAAGC | |
| | | UUUUGAGAUAGUAUACAACUAUUUCUAAAUAAUUGAAAAA | |
| | | UGGCGACGAGAAAUCAAGGUUUUCAGCCUUUAACAGUAUA | |
| | | CGACUUUAUUAUGUUUUUACACACCAUUCAUUACGAAAGC | |
| | | AUUACUAUUCGUAGUUGCACUAAUGUUUGCUGUGUUAAUA | |
| | | UUUGUUAGAUUUUCAAUUUCAAUAAAAAUAUUUACUGUAU | |
| | | UGAUUGUAAUACUAGUUUGCAUUUUAUUAACUAUAUUUUA | |
| | | AUUUGAAAUUUUGGAAUUUAAUUUAUACUGCCGUGUAACC | |
| | | GAUCGAUUCUAAUAAUAUCUAAACCUUCUAAAUCGAUCGA | |
| | | AUUUUGACACAGUUAAUCAAAGGGUAAUUUAACUGUUAUA | |
| | | UAGGAUGAUUUUGAAAUCUCACCCACCCUAACAAGCAAUC | |
| | | CUGAAGGCGGGUGAGAUGCCAUUUAGAUUAUUAUCUCUAU | |
| | | CUGGAUAGAUAGCGCAAUCAAAGUAUACAACUUUA | |
| | CRISPR | | X |
| | array | | |

[1021] Further exemplary CAST IB-2 systems are detailed in Table 13 below. CAST J-B2 uses TnsD to home to tRNA and TniQ to RNA-guided transposition. It has a TnsAB fusion component.

TABLE 13
CAST IB-2

| | | | SEQ |
|---|---|---|---|
| Contig | Protein | | ID |
| Accession | name | Sequence | NO: |
| GCA_002368 | TnsAB | MLSDIEFEHWCRRLNLSEQARKVIEQIRTSEPSRRVGGGK | 486 |
| 215.1_ASM2 | | KNVSGRYPSSKMGVSIQFESHRNELAHIYKLETDDDVLEY | |
| 36821v1_ | | YDQPPPIFLDYLSKNGRRNYHSHTPDFFVIRKSAAGWEEC | |
| genomic\| | | SVEQNLLKKVQDSPNRWQRQEDGTWICPPGKEYAAQFGLY | |
| AP018184.1\| | | YVVRSSAEINSIFLRNFVWLEDYLNNQQLTVDDEITDAVC | |
| 6522801 | | NLVKLQPGISLANIIYQIKEASIDDLNTLIATNQVYVDLN | |
| \|Nostoc | | TYLLAQPEKVKVFLDEEEAFTFNQITKVSEPQAINKLGIF | |
| | | KASVGTSIFWDGSKWEIANTGEKSIALITQDGKFIDLPNH | |
| | | VFETLVRDKKITSLQTPEEPTINSEVEELLRKASTEDRKE | |
| | | ATSRYKAIEAFLNGNSSNKPNRSQRRWIASYRKAEKTYGR | |
| | | GFIGLLPKHRDKGWRRQGIPEEVLLFMQQHIEINYENIKQ | |
| | | HSIRHAYQSFKDLCNEKGYKPPSSESYRQAVRNRPQYKQI | |
| | | QKRMGDRAAYKEEPFYWYIHREETPPHGDRPFEICHIDHT | |
| | | EVDVELLSAIMLKLGMDISVIKEKASMGRPWLTLMLDAYS | |
| | | RRIIAAYMTFDSPSYRSNMMILKMCVQRYGRLPQIIVVDG | |
| | | GADFGGTYFETLLAYFRVTKKERPAAKARHGSVIESYFGV | |
| | | ADKEFWHNLMGNTQITKNVRQVTKSVNPKNNAVWTLAKLY | |
| | | SYFCEYCYEIYDTCPHPALRMSPREAFNIGTARSGSREHT | |
| | | FINEEEFKFLALPSPTDSAGTRKITQEGVKINYLYYWHSC | |
| | | FSRFRNIKVEVKYDPFDITQAYAYINGEWVKCHSRYLREL | |
| | | EGHSERELMIAAAELKKLNRIQNKQFSDITGKKLAEFFRR | |
| | | IEMEEAALAPPWLEAKKAVLQQRLRDSELKQVHAQIEGKI | |
| | | DESETITSTNVENSAFIKAEHLTKQFTESSQQELDDENLV | |
| | | ESFEPLEEW | |
| | TnsC | MSGQYRFPLELLEQPPQKRLQFFKNPGVTIMHHNLKNAFY | 487 |
| | | KLHRIIREPAGSSIILVIGPSGVGKSTLLQLLKNKIIEES | |
| | | LGQMEADPGWIPIVCVEAPAPAKGTFRWKIFYRKILEAVD | |
| | | EPGIDQKINYNSDGIRRDSDGKLAFGAKATEDSLRLAMEK | |
| | | ALIHRRPYTLSVDEFQHIGKMASEQLLQAHMDCVKSAVNT | |
| | | TKIPWTGFGTYQLLNFLELSPQLSRRTKIMHIPRYLLEKD | |
| | | EDIQEFKRVLEHLQYRMPLQETPPLKEKYWEFCYERSIGN | |
| | | IGTLKNWLTDAYDLAVFEDANTLTLEHLQETAKSSSECEQ | |
| | | MALEAIEGEEKLTDSQDKSKSLRTILGLAKDETQNSNKSS | |
| | | THVQEHNQKSQKSSNKTKAFKRNPSRDPVRGEPV | |
| | TnsD | MNINISSELRELRKSQLPTRSRLYHLKPIGVGTSTVESLT | 488 |
| | | SYITRLAVSHCLPTGVLMVTEIAPVINKTYGAGTLHRIYN | |
| | | FTGALNGTGVMASDLVQALENLTQQKNLHFLTLLTWAEIL | |
| | | PSRNLLRRHRAWCSFCYQEWYENGQTIYEPLLWTLDVVKV | |
| | | CLRHQQPLTQKCPHCKEKNFHLAWRSQPGYCSKCLKWLGL | |
| | | NVETQLSNCPYSHKDELEFEIWITNTLGELLAKSPHLTLS | |
| | | PSKDNISKAICAYVDKVAEGNIAAFARQLQVPRNTVWLWC | |
| | | KGQNLPSIKAVLHVCYSLRISLLDFLNFEEDLVDSLSTLR | |
| | | LPLPQTKANRKKSIKPFEADEVKQNLEAVLESNEFPAPSM | |
| | | EEVARRLQCDRRSIFKYFPDLCHAISSRYLSDRKAILENK | |
| | | IEQCCEEIRQITLNLHNQGIYPSEKSVSEQMTMPGYLRYR | |
| | | KVRLALQEIQSQSGR | |
| | TniQ | MTIYLEHWSIIPLEIPQRSRLFSLEPVAVGTSYAESLSSY | 489 |
| | | LHRLAQAHCLTTQKLVMGEIAPLILKDEEKSELLAKNLSH | |
| | | LLGNRDAKPAINGMREMTGKLVTVLEELTMRQDLRFLTLL | |
| | | SWKGMIYDKGLFRNYRAWCPCCWEGWKQENKTIYEPLLWS | |
| | | FKDIEFCLIHKQRLIEECPHCGSRLPMMARFSPAGFCSHC | |
| | | YGWLGQEIKGEEEIEKYRVNIQGISELIALTPELGYKPIP | |
| | | IELTRKLQLILLVFEQAIGKDLQLLGDLGGIMESLRIASK | |
| | | TNQSQPYHLVKLIIPVCEKAKISVSQLFGSDFKELGKILF | |
| | | GNFRLELKL | |
| | Cas6 | MTAILLQSEEYVDLTFKLRGALIPLDNGYVIYSALSRICP | 490 |
| | | ILHELKSIGIHPIAGIPTKNNLLELTTQSRLKIRIYHQHI | |
| | | PLIYPYLAGQAFHIGQNFYQLDIPDYKPLISSESVYSRLV | |
| | | IIKGFQDATNFIEAVQRQLDNLGIQGKIELLTRQDGTPQK | |
| | | RQLTINKEGKQFKIRGFGVKISELNPEDSLTLQEQGIGGK | |
| | | RKMMCGIFVPATRSKEEEET | |
| | Cas8 | MVATQPKISLSLDAADTTIMHRAGMTGLYMTLKRLEKQYT | 491 |
| | | SSRQRGGHISWFLTADTIKLFWEGSDFVALSWLIKESFQL | |
| | | DDTGLIHLTALSNAAIDLRQKIHIHEGICAVFLRHNQFYQ | |
| | | AGKIVNAELTVEEKKVEYRYKSLTWYAHQTFAEKLCEADT | |
| | | QQLREDYVQMTSWLYLGGIVRHARTQNTTKLEEKPEYALA | |
| | | LLFVPVVCHYCLLHIPSEDLKEKKPHRYGVVIPEINDFED | |
| | | ASQRRWRLQQLETKQLNVSSLGEAGLLYYSLDDIQPEGGY | |
| | | YQACQVWLYEKMNKDSRQRTLMSIEEIEVDKNTLITYQQV | |
| | | QKYF | |
| | Cas8 | VNPIRSIIADNLVKGIHWWSDFWEKLVIEDSNEYLFNQLF | 492 |
| | | FNREGFIIMAENSEEDKHYLIFLKVFQQAMKGNFAKMYAK | |
| | | AEAGKDPPIKKKVERLRAELNYCYDELSFKEYLSDFLVRG | |
| | | GLNKYFNQHQEEIALLIKKIPWQELRIWSLLAIASYKPKD | |
| | | KPIEMNDESEEE | |
| | Cas7 | MMSQKKNDNNIPNYYLYGTVLTRYGLASLNHDMRRGNKTT | 493 |
| | | LQKGYWNGKIHSFVGANAIRWALRFYLQKQGYLVNRVWDE | |
| | | DEHINRLTSEDFDPEEFYDDDIFGFALLESAETEEETSTT | |
| | | KKKKKQKTVSSPNQRIGALAMNMAVSLTPYDGAVKLGAKS | |
| | | GRDKDSTSLHFTEYHATRYQYYFGINPTHLKEMSRILPLI | |
| | | DGIMDMPKVGGSSNIFNYSFCPDSLVFQWTNHFASYISYC | |
| | | FEYCDPKTKEAKLAQEFIDEVECGQIDPSTLWIGGTIVKE | |
| | | LKQLDNFDNSPFNRAHIYRNRNELVEALKAVIKRDLGLQE | |
| | | SK | |
| | Cas5 | MIAPLILYLDVPFATFRESHAREMGKTYPVPPPATVYGML | 494 |
| | | LSLVGETDVYRHCGVELAIAMLSSPKKSRILRQMRRFKNA | |
| | | DFSHPENVIPCYQEILSNVKCLIWVRSDGEKIELSLRERI | |
| | | LLAFDHPELVRRFGCLFLGESDQLIKTIKLVSQDYPEGVR | |
| | | QWAIRDNRGRLTLPYWVDHVGSRNTRFLRYRIEEMPSSLP | |
| | | PDLAWTMITSPI | |
| | end1 | TTTTTATAAAGTTAGGTTCCATAGGTATTGTTTGCGACAA | 495 |
| | | CAACCTTAAGTTGTCCTGATTGGTCACTTTATGCTTGTGA | |
| | | TACTCTCTGGTCAACTTATGCTTGTCAAATGTTGCACTCC | |
| | | GCAGTGAGTTAGGTATTAGCAAACAGAAATGAGAGGTAAT | |
| | | TATTAAGTCAGCAGAGATTTTACCTAAATTTTAG | |
| | end2 | CAGCGCGACCAGCAGACCATCGCATCAAGCCCAATTTCCG | 496 |
| | | CAAGCATATAATTTTGCAGTTTTATTTTAGGAGCGATCGC | |
| | | ACTCACGAGAGAATTAGCATCTGGCTTATTCAGATGCAAA | |
| | | GCTATGTTTACATCACACAGTTAATTAAATGTGAATTTAT | |
| | | GGATTTTTAATTTATAACTTTTGGTCAACTAATGCCTAGT | |
| | | ATTTTCACATTAGGTCAATTAATGCTTGTCAATAGTTTTT | |
| | | TTGCTATGATCGCCCTCACGAAAGAATGAGGCTTTGAAAG | |
| | | CATATCTTGGTCAACTATTGGTTGTCATTTAGGACAACTT | |
| | | ATAGTTGTTGTCGCATTGTTGAAAGCATAAAGCTTATGCT | |
| | | TTCGATTCAAATTGCTAATATTAGATCGTCAATTTTTGTG | |
| | | AGATGGAAGTTAATATAATTCCTAATCTCCAAC | |
| | CRISPR | CTACTCTCCTAATAGAAATCCTCTCTGGTATAGGAGCGTA | 497 |
| | array | AGTAGCGATCGCACTCCATCTTAAACCAGTGGGCGATCGC | |
| | | TTTGAGCAACGCCTAACGGCATCAAGCCACGAATCACCTA | |
| | | AAAGCCAAGTTGGCTTCAAACATCGCAATTTTCTCTTGAG | |
| | | CAACGCCTAACAGCATCAAGCCACGAATCACAGCAAAGGT | |
| | | GAAAACCCTTAACACAGGAAGCTTCATTTACAATCTTA | |
| GCA_001548 | TnsAB | MLSDIEFEHWCRRLNLSEQARKVIEQIRTSEPSRRVGGGK | 498 |
| 375.1_ASMI | | KNVSGRYPSSKMGVSIQFESHRNELAHIYKLETDDDVLEY | |
| 54837v1_ | | YDQPPPIFLDYLSKNGRRNYHSHTPDFFVIRKSAAGWEEC | |
| genomic\| | | SVEQNLLKKVQDSPNRWQRQEDGTWICPPGKEYAAQFGLY | |
| AP017295.1\| | | YVVRSSAEINSIFLRNFVWLEDYLNNQQLTVDDEITDAVC | |
| 6463965 | | NLVKLQPGISLANIIYQIKEASIDDLNTLIATNQVYVDLN | |
| \|Nostoc | | TYLLAQPEKVKVFLDEEEAFTENQITKVSEPQAINKLGIF | |
| | | KASVGTSIFWDGSKWEIANTGEKSIALITQDGKFIDLPNH | |
| | | VFETLVRDKKITSLQTPEEPTINSEVEELLRKASTEDRKE | |
| | | ATSRYKAIEAFLNGNSSNKPNRSQRRWIASYRKAEKTYGR | |
| | | GFIGLLPKHRDKGWRRQGIPEEVLLFMQQHIEINYENIKQ | |
| | | HSIRHAYQSFKDLCNEKGYKPPSSESYRQAVRNRPQYKQI | |
| | | QKRMGDRAAYKEEPFYWYIHREETPPHGDRPFEICHIDHT | |
| | | EVDVELLSAIMLKLGMDISVIKEKASMGRPWLTLMLDAYS | |
| | | RRIIAAYMTFDSPSYRSNMMILKMCVQRYGRLPQIIVVDG | |
| | | GADFGGTYFETLLAYFRVTKKERPAAKARHGSVIESYFGV | |
| | | ADKEFWHNLMGNTQITKNVRQVTKSVNPKNNAVWTLAKLY | |
| | | SYFCEYCYEIYDTCPHPALRMSPREAFNIGTARSGSREHT | |
| | | FINEEEFKFLALPSPTDSAGTRKITQEGVKINYLYYWHSC | |
| | | FSRFRNIKVEVKYDPFDITQAYAYINGEWVKCHSLYLREL | |
| | | EGHSERELMIAAAELKKLNRIQNKQFSDITGKKLAEFFRR | |
| | | IEMEEAALAPPWLEAKKAVLQQRLRDSELKQVHAQIEGKI | |
| | | DESETITSTNVENSAFIKAEHLTKQFTESSQQELDDENLV | |
| | | ESFEPLEEW | |
| | TnsC | MSGQYRFPLELLEQPPQKRLQFFKNPGVTIMHHNLKNAFY | 499 |
| | | KLHRIIREPAGSSIILVIGPSGVGKSTLLQLLKNKIIEES | |
| | | LGQMEADPGWIPIVCVEAPAPAKGTFRWKIFYRKILEAVD | |
| | | EPGIDQKINYNSDGIRRDSDGKLAFGAKATEDSLRLAMEK | |
| | | ALIHRRPYTLSVDEFQHIGKMASEQLLQAHMDCVKSAVNT | |
| | | TKIPWTGFGTYQLLNFLELSPQLSRRTKIMHIPRYLLEKD | |
| | | EDIQEFKRVLEHLQYRMPLQETPPLKEKYWEFCYERSIGN | |
| | | IGTLKNWLTDAYDLAVFEDANTLTLEHLQETAKSSSECEQ | |
| | | MALEAIEGEEKLTDSQDKSKSLRTILGLAKDETQNSNKSS | |
| | | THVQEHNQKSQKSSNKTKAFKRNPSRDPVRGEPV | |
| | TnsD | MNINISSELRELRKSQLPTRSRLYHLKPIGVGTSTVESLT | 500 |
| | | SYITRLAVSHCLPTGVLMVTEIAPVINKTYGAGTLHRIYN | |
| | | FTGALNGTGVMASDLVQALENLTQQKNLHFLTLLTWAEIL | |
| | | PSRNLLRRHRAWCSFCYQEWYENGQTIYEPLLWTLDVVKV | |
| | | CLRHQQPLTQKCPHCKEKNFHLAWRSQPGYCSKCLKWLGL | |
| | | NVETQLSNCPYSHKDELEFEIWITNTLGELLAKSPHLTLS | |
| | | PSKDNISKAICAYVDKVAEGNIAAFARQLQVPRNTVWLWC | |
| | | KGQNLPSIKAVLHVCYSLRISLLDFLNFEEDLVDSLSTLR | |
| | | LPLPQTKANRKKSIKPFEADEVKQNLEAVLESNEFPAPSM | |
| | | EEVARRLQCDRRSIFKYFPDLCHAISSRYLSDRKAILENK | |
| | | IEQCCEEIRQITLNLHNQGIYPSEKSVSEQMTMPGYLRYR | |
| | | KVRLALQEIQSQSGR | |
| | TniQ | MTIYLEHWSIIPLEIPQRSRLFSLEPVAVGTSYAESLSSY | 501 |
| | | LHRLAQAHCLTTQKLVMGEIAPLILKDEEKSELLAKNLSH | |
| | | LLGNRDAKPAINGMREMTGKLVTVLEELTMCQDLRFLTLL | |
| | | SWKGMIYDKGLFRNYRAWCPCCWEGWKQENKTIYEPLLWS | |
| | | FKDIEFCLIHKQRLIEECPHCGSRLPMMARFSPAGFCSHC | |
| | | YGWLGQEIKGEEEIEKYRVNIQGISELIALTPELGYKPIP | |
| | | IELTRKLQLILLVFEQAIGKDLQLLGDLGGIMESLRIASK | |
| | | TNQSQPYHLVKLIIPVCEKAKISVSQLFGSDFKELGKILF | |
| | | GNFRLELKL | |
| | Cas6 | MTAILLQSEEYVDLTFKLRGALIPLDNGYVIYSALSRICP | 502 |
| | | ILHELKSIGIHPIAGIPTKNNLLELTTQSRLKIRIYHQHI | |
| | | PLIYPYLAGQAFHIGQNFYQLDIPDYKPLISSESVYSRLV | |
| | | IIKGFQDATNFIEAVQRQLDNLGIQGKIELLTRQDGTPQK | |
| | | RQLTINKEGKQFKIRGFGVKISELNPEDSLTLQEQGIGGK | |
| | | RKMMCGIFVPATRSKEEEET | |
| | Cas8 | MVATQPKISLSLDAADTTIMHRAGMTGLYMTLKRLEKQYT | 503 |
| | | SSRQRGGHISWFLTADTIKLFWEGSDFVALSWLIKESFQL | |
| | | DDTGLIHLTALSNAAIDLRQKIHIHEGICAVFLRHNQFYQ | |
| | | AGKIVNAELTVEEKKVEYRYKSLTWYAHQTFAEKLCEADT | |
| | | QQLREDYVQMTSWLYLGGIVRHARTQNTTKLEEKPEYALA | |
| | | LLFVPVVCHYCLLHIPSEDLKEKKPHRYGVVIPEINDFED | |
| | | ASQRRWRLQQLETKQLNVSSLGEAGLLYYSLDDIQPEGGY | |
| | | YQACQVWLYEKMNKDSRQRTLMSIEEIEVDKNTLITYQQV | |
| | | QKYFQTNYQQIKPKQIFIKVNPIRSIIADNLVKGIHWWSD | |
| | | FWEKLVIEDSNEYLFNQLFFNREGFIIMAENSEEDKHYLI | |
| | | FLKVFQQAMKGNFAKMYAKAEAGKDPPIKKKVERLRAELN | |
| | | YCYDELSFKEYLSDFLVRGGLNKYFNQHQEEIALLIKKIP | |
| | | WQELRIWSLLAIASYKPKDKPIEMNDESEEE | |
| | Cas7 | MMSQKKNDNNIPNYYLYGTVLTRYGLASLNHDMRRGNKTT | 504 |
| | | LQKGYWNGKIHSFVGANAIRWALRFYLQKQGYLVNRVWDE | |
| | | DEHINRLTSEDFDPEQFYDDDIFGFALLESAETEEETSTT | |
| | | KKKKKQKTVSSPNQRIGALAMNMAVSLTPYDGAVKLGAKS | |
| | | GRDKDSTSLHFTEYHATRYQYYFGINPTHLKEMSRILPLI | |
| | | DGIMDMPKVGGSSNIFNYSFCPDSLVFQWTNHFASYISYC | |
| | | FEYCDPKTKEAKLAQEFIDEVECGQIDPSTLWIGGTIVKE | |
| | | LKQLDNFDNSPFNRAHIYRNRNELVEALKAVIKRDLGLQE | |
| | | SK | |
| | Cas5 | MIAPLILYLDVPFATFRESHAREMGKTYPVPPPATVYGML | 505 |
| | | LSLVGETDVYRHCGVELAIAMLSSPKKSRILRQMRRFKNA | |
| | | DFSHPENVIPCYQEILSNVKCLIWVRSDGEKIELSLRERI | |
| | | LLAFDHPELVRRFGCLFLGESDQLIKTIKLVSQDYPEGVR | |
| | | QWAIRDNRGRLTLPYWVDHVGSRNTRFLRYRIEEMPSSLP | |
| | | PDLAWTMITSPI | |
| | end1 | TTTGTACATTAAATAATTATTGTCAGTTTTAAATGCGACA | 506 |
| | | ACAACCTTAAGTTGTCCTGATTGGTCACTTTATGCTTGTG | |
| | | ATACTCTCTGGTCAACTTATGCTTGTCAAATGTTGCACTC | |
| | | CGCAGTGAGTTAGGTATTAGCAAACAGAAATGAGAGGTAA | |
| | | TTATTAAGTCAGCAGAGATTTTACCTAAATTTTA | |
| | end2 | GATGTTGGACGGCATAATAATTTGCCAGCGCGAGCTTCTT | 507 |
| | | GCAGGTCTTTTTTCAGCCTATCAGAGAAGCTACAGCGCGA | |
| | | CCAGCAGACCATCGCATCAAGCCCAATTTCCGCAAGCATA | |
| | | TAATTTTGCAGTTTTATTTTAGGAGCGATCGCACTCACGA | |
| | | GAGAATTAGCATCTGGCTTATTCAGATGCAAAGCTATGTT | |
| | | TACATCACACAGTTAATTAAATGTGAATTTATGGATTTTT | |
| | | AATTTATAACTTTTGGTCAACTAATGCCTAGTATTTTCAC | |
| | | ATTAGGTCAATTAATGCTTGTCAATAGTTTTTTTGCTATG | |
| | | ATCGCCCTAACGAAAGAATGAGGCTTTGAAAGCATATCTT | |
| | | GGTCAACTATTGGTTGTCATTTAGGACAACTTATAGTTGT | |
| | | TGTCGCAAATTGTTGAAAGCATAAAGCTTATGCTCTCGAT | |
| | | TCAAATTGCTAATATTAGACCGTCAATTTTTGTGAGATGG | |
| | | GAGTCAATATAATTCCTAATCTCCAACT | |
| | CRISPR | TTGAGCAACGCCTAACGGCATCAAGCCACGAATCACCTAA | 508 |
| | array | AAGCCAAGTTGGCTTCAAACATCGCAATTTTCTCTTGAGC | |
| | | AACGCCTAACAGCATCAAGCCACGAATCACCACTCAAAAA | |
| | | CTGAAATAACACCAGTCCAAACTATTTGAGCAACGCCTAA | |
| | | CAGCATCAAGCCACGAATCAC | |
| GCA_002368 | TnsAB | MKEQFEQWVARLQISEAGQKIIEKVRSSEPSRRVGGGSKN | 509 |
| 155.1_ASM2 | | VSGRYPSRKMGVTIQFESHRVELPIIYQLEHDEDVLEFYD | |
| 36815v1_ | | QPPQIKLDYQASNGRRLGVLHTPDFFVIRTNSAGWEECKT | |
| genomic\| | | EQELKKLAEKNPNRYFYFEEDNQWHCPPGEVYAHQFGLYY | |
| AP018180.1\| | | RIRSDREINWVVQRNLQFLEDYYRAESLAVEEAIAQSLLA | |
| 8352649 | | IVSSQPGIVLAELLNQPTGAKSDDIYTLIAQEQIYFDLNA | |
| Nostoc | | APLAEPERCLIFRDEQTANAYRLIVEKPSVNLPAISPVIN | |
| | | LATGTPVSWDGKGLNIIHVGETEVILGAENNQLIELKKAV | |
| | | FENLVRQGKITSLQTPENTAISTESWQRFYQASPEDQAEA | |
| | | LERYKTIEPYLNGHPPENETIPARTIRDWKAKYLTALQKY | |
| | | GCGYIGLLSHRSVKGNRQRKLPEDTLAIMERFILEDYETL | |
| | | KQKRMLEVYGALVLACEQSSVIAPSYKAFTKEVKRRTGYE | |
| | | QTKKRQGRRAAYQHESFYWELTQKTPRHGDRPFEIGHIDH | |
| | | TQLDVELVCSRTGRNLGRPWATFLVDAYSRRLLAVYVTFD | |
| | | SPSYRSCLMVLRICVQRHGRLPQIVVVDNGPEFDSKYFEI | |
| | | LLATFECTKKQRPPAKARFGSVCERLFGTSNTQFVHNLLG | |
| | | NTQITRNVRQVTKSVNPKNQAVWTLGLLYEYLCAWAYEVY | |
| | | DTDEHPALFQSPRDAFAAGMVTSGSRLHRMIPYDENFQIL | |
| | | TLPTTSEGKAKVQVGRGVKINSIYYWSNSFRDPQIENTSV | |
| | | PTRYDPFNIGIAYAFVRGQWVQCISQYYSQLQGRSEKELK | |
| | | LASAELRKRQQNYGRQSQVSAKNLAEFLTSVEAQETLLEQ | |
| | | RSYDAEAREVFIVIEGGKAATSRNEQPKLIQVPFENTDTQ | |
| | | VAEDEAIAPETLVVYEEFSL | |
| | TnsC | MTQTNGFPLELLTRPTPERLAYFENYTVGHPRLKEVSEIL | 510 |
| | | MRTIAEPAGASFIFVYGPSGVGKTTLRLRVEQKLTELVLP | |
| | | LLESDRGRVPVVGVEAVAPESRNFNWKDYYTRALIALEEP | |
| | | LIDHKFDYGVRGISRDNFGKINVESKVVAPALRRALENAL | |
| | | IHRHPDVFFVDEAQHFGKMASGYKLQDQLDCLKSLANMTG | |
| | | ILHCLLGTYELLTFRNLSGQLSRRSVDIHFRRYCAENPED | |
| | | VQAFKSVLLTFQQQMPLAEAPDLVSHWEYFYERTLGCVGI | |
| | | LKNWLTRALKDALDREATTVTLKDLQKRAWSVAQCQRMFK | |
| | | EIQEGERQLSETETDIQNLRSALGLGAKPIVLPEETPKTT | |
| | | RPPAKVGKRKPKRDPIGVQQDVS | |
| | TnsD | MLANGLVTYESWDLKQLSIPSRSLLYQLQPVGIRTPMVES | 511 |
| | | LIWCEIIPTRNLFRTQSAWCAVCYEEWSLNNQVIYKPLLW | |
| | | TINSVKVCALHKICLCLQCPHCQQELPLLSWRSRPGYCSK | |
| | | CGGWLGMNLPVKSASELMACSTLSKEELHSQTWIVEVIGE | |
| | | LISSTLSFKSPPVKEEIAKSLSLVIDAVTDGNIAEFARLM | |
| | | GIPKNTLWMWQTGKALPVLDILLKICYRLEISLLDLLKPE | |
| | | QLAAKSFTKISHKTIRRSPTLRASPKLFDANQVQDALLAI | |
| | | LASDKEPPLTMEEVATGLGYDRRTIFRHFPDLCRAISAKY | |
| | | RSYGKACHTEKIQQSCREVKQIVLKLHHQGEYPSEARVSE | |
| | | IMTNPGYLRYKQVRAALNETRHEIGF | |
| | TniQ | MVNPRGMTIYLEHWNLKPLEIPQRSRLFSLEPVAVGTPYA | 512 |
| | | ESLSSYLHRLAQAHCLTSQKLVMGEIAPLILKDEDKSELL | |
| | | AKNLSHLLRNSDAKPAINGMREMTAKLVIVLEELTMRQDL | |
| | | RFLTLLSWKGMIYDKGLFRNYRAWCPCCWEEWMQENKTIY | |
| | | EALLWSFKDVEFCLIHKQRLIEECPHCGSRLPVMAKFSPA | |
| | | GFCSRCYGWLGQEIKGEEEIEKYQINIQGISELIALTPQL | |
| | | GYEPIPIELTRKLQLILLVFEQAIGKDLQLLGDLGGIMES | |
| | | LRIASTKNQSQPYHLVKLIIPVCEKAKISLSQLFGLDFQE | |
| | | LGKILFGNFSLELKL | |
| | Cas6 | MAAILIQSEEYVDLTFKLRGAPIPLDNGYVIYSALSRICP | 513 |
| | | ILHELESIGIHPIAGIPTRNNLLELTAQSRLKIRIHHQQI | |
| | | PLIYPYLAGQAFHIGQNSYQLDIPDYKPLISSESVYSRLV | |
| | | IITGFQDSTNFIEAVQRQLDNKGIQGKIEFLTRQDGTPQK | |
| | | RQLTINQKGKQFKVRGFGIKISSLTPEDSLTLQEQGIGGK | |
| | | RKMMCGILVPATHSKEEEET | |
| | Cas8 | VFATQPKISLSLDAADTTIMHRVGMTGLYMTLKRLEKQYP | 514 |
| | | SSGQRGEHISWSLTADTIELFWEGSDFVALSWLIKESFQL | |
| | | DDTGLIHLIGLDNDAIDLSQKIHIHEGICAVFLRHNQFYQ | |
| | | AGEIVNTELTVEEKKVEYQYKSLTWYAHQTFAEKLCEVDT | |
| | | QQLRQDYVQITSWLYLGGIVRHARTQNTTKLEEKPEYALA | |
| | | LLFVPVVCHYCLLHIPTEDLKEKKPHRYLVVIPEIKDFED | |
| | | ASQRRWRLQQLEAKQLHVSSLGEAGLLYYSLDDIQPEGSY | |
| | | YQACQVWLYEKMNKDSRQRTLMSIQEIEIDKNTLITYQQV | |
| | | QKYFQTNAQKIEYKQIFIKVNPIRSLIADNLVQGLYWWSN | |
| | | FWEKLVMEDSKEYLFNQLFLNREGFIIMVENSEEDKHYLI | |
| | | FIKVFQQAMKSNFAKMYAKAEEGKDPPIKKKVERLRAELN | |
| | | YCYDELSFKEYLSDFLVRGGLNKYLNQNQAEILLLIKKTP | |
| | | WQELRIWALLAIASYKPKEKTINKDDSLTPNNQKLEEVND | |
| | | DSEEE | |
| | Cas7 | MMTLKKNDNNIPNYYLYGTVLTRYGLASLNHDMRLGNKTT | 515 |
| | | LQKGFWNGKTHSFVGSSAIRWALRFYLQKQGYLVNRVWDE | |
| | | DEHLNRLTSEYFDPEQFYDDDIFGFALLESAETESETSTT | |
| | | KRKKKQTKTSTSNQRRGALAMNMAVSLTPYDGAIKLGAKS | |
| | | GREKDSTSLHFTEYHATRYQYYFEINATHLKDYSRILPVI | |
| | | DGIMELPKVGGSSNIFNYPFCPDSLVLHWTNNFASYISYC | |
| | | FEYCEPQSKEAKFTQEFIDEVECGQIEPSQLWIGGTIVKD | |
| | | LQQLDNFDDSPFKKAHIYRNRNELIENLKTVIKKDLGLEE | |
| | | SK | |
| | Cas5 | MTAPLILYLDVPFATFRESHAREMGKTYPVPPPATVYGML | 516 |
| | | LSLVGETDVYRHCGVELAIAMLSIPKKSRVLRQMRRFKNA | |
| | | DFSHPENSIPSYQEILSNLKCLIWVRSEGEKIQPSLRERI | |
| | | QLAFDHPELVRRFGCLFLGESDQLIKSIKLVSQDYLQGVR | |
| | | HWAIRDNRGRLTLPYWVDHVGSRNTRFLRYRIEEMPSSPP | |
| | | PDLAWTMVQSPI | |
| | end1 | GTTACGTCCATTTGTTGTACAGTGACTAATTATTTGTCGT | 517 |
| | | TGTGTGACTTTACCCATAACTTTGCCGCAACGGCAAGCTT | |
| | | ATGGTTCCAATAGAGGGCGGCAAAGTTATGCTTCCAATTT | |
| | | TCCATATATACAGAAAGAAGCTAACTAAGTCTACCCTTTT | |
| | | TAAGTTTAATAGCT | |
| | end2 | GAGGGTTTGCAGCTTTTACCAGCATAAACAATGATGCAAT | 518 |
| | | TTAAATGACGATTAGCTTACTTGCTAGACAAAATTCTTCA | |
| | | CCTGACCCGTCTTCTAGTTTATCCGTACCACTTTGTCACA | |
| | | ATTTAGATGCGTTTGCCCTGATGGTTCCAGTAGTGGCAAA | |
| | | GTTATGGGTAAAGTCACAATTTTTCAGATAGTCTAATGAA | |
| | | TATTGATTAAATAACAAGCGCTTTGTTTGTCCTTTCCCCC | |
| | | ATTCCCTATGCTGTAAACGCTTTGCCCATAGGCTTCTTGG | |
| | | GCATAAACATTTGTGACATCATTTGATTTAAAAACATTTA | |
| | | GATAATAATCAAGAGCCTAAAACCTGAAAAGTCTTTATGA | |
| | | GTGAGGATTATGACGATTAAGATTATGTATGTCAACCATG | |
| | | ACAACAATTATTTAAATTGGACAAAAATTATTTAATGGAC | |
| | | AGTAATATACTTGTCGATGAACTACTTTTTTGCACGTTAA | |
| | | CAAAATAATTAGTTA | |
| | CRISPR | TTGAGCAACGCCTAACGGCATGAAGCCACGAATCACACGC | 519 |
| | array | ACTCATAGGGGCAATAGTCAGCGTCAATATGCTGAGCAAC | |
| | | GCCTAACGGCATCAAGCCACGAATTACGCGAGACTAGCAG | |
| | | TCGGGGATGGCTGCAAAGAACCCTGAGCAACGCCTAACGG | |
| | | CATCAAGCCACGAATTACTAACCACTAACATCGGGTAATT | |
| | | GGCAGGCTTCATCTGAGCAACGCCTAACGGCATCAAGCCA | |
| | | CGAATTAC | |
| GCA_003326 | TnsAB | MKEQFEQWVARLQISEAGQKIIDKVRSSEPSRRVGGGSKN | 520 |
| 195.1_ASM3 | | VSGRYPSRKMGVTIQFESHRVELPIIYQFEHDKDVLEFYD | |
| 32619v1_gen | | QPPQIKLDYQASNGRRLGVLHTPDFFVMRTNSAGWEECKT | |
| omic\|LXQE0 | | EQDLKKLAEKSPNRYFYSEEDNQWNCPPGEDYANQFGLYY | |
| 1000125.1\| | | RIRSDREINWVLQRNLQFLEDYYRSESLVVEEAITQSLLA | |
| 29031.5\| | | VVSSQPGITLAELLNQSTGAKSDDIYTLIIQEQIYIDLNA | |
| Nostoc | | TPLAEPERCLIFRDEQTASAYRLMVEQPSVNLQAISPVVN | |
| | | IVTGTLVSWDGKGLNIIHVGETEVILGAENNQLIELKKAV | |
| | | FENLVRQGKITSLQTPEKTAISTESWQRFRQASPEDQAEA | |
| | | LERYKIIEPYLNGHPPENETIPARTIRHWKAKYLTAIQKY | |
| | | GCGYIGLLSHRSAKGNRQRKLPEDTLASMERFISEDYETT | |
| | | KQKRIWEVYAALVRVCEQSGVIAPSYKAFTKEVKRRTGYE | |
| | | QTKKRQGHRAAYQYESFYWELTTTTPRHGDRPFEIGHIDH | |
| | | TELDVELVCSDTGRNLGRPWATFLVDAYSRRLLAVYVTFD | |
| | | SPSYRSCLMVLRICVKRHGRLPQIVVVDNGAEFHSVYFET | |
| | | LLATFECTKKQRPPAKARFGSVCERLFGTSNTQFVHNLLG | |
| | | NTQITRNVRQVTKSVNPKNLAVWTLGLLYEYLCAWAYEVY | |
| | | DTDEHPALFQSPRDAFAAGIAIGGSRVHRMIPYDENFQIL | |
| | | TLPTTSEGKAKVQVGRGVKINSIYYWSNSFRDPQIENTSV | |
| | | QIRYDPFNIGIAYAFVRGQWVQCISQYYAELQGRSEKELK | |
| | | LASIELRKRSSNHAQQSKVSAKNLAEFLASVEAQEALLEQ | |
| | | RSYDTEAREVFRVIEGGKAATSRNEQPKLIQVPFGNTDSQ | |
| | | VDEDEALIPEILVVYEDF | |
| | TnsC | MTTLDAFPLELLTQPATERLAYFENKTVAHPRLQEVNEIL | 521 |
| | | MRTIAEPAGASFIFVYGPSGIGKTTLRLRAEEKLTELALP | |
| | | KLESDRAHVPVIGIEAIAPESRYFNWKEYYTRALIALEEP | |
| | | LIDHKFDYGVRGISRNNFGKINVESKVVAPALRRALENAL | |
| | | IHRHPDVFFVDEAQHFGKVASGYKLQDQLDCLKSLANMTG | |
| | | ILHCLLGTYELLTFRNLSGQLSRRSVDIHFRRYCADSPED | |
| | | VQAFKSVLLTFQQHMPLAETPNLVDHWEYFYERTLGCVGI | |
| | | VKDWLMRALKDALDREATTITLKDLQKRALSVAQCQKIFK | |
| | | DIQEGELQLSETEAHVQDLRSALGLGAKPIVLPEETPKTT | |
| | | RPPKKVAKRKPKRDPIGVQQDVS | |
| | TnsD | MLASVLETYESWNLKKPLIPQRSRLYQPQPVGLGTPYIES | 522 |
| | | LTGYIARIAELHGVLPGVLMTREIAPMVNKLYFQNGANRG | |
| | | FREIFNRSQALNGMGEMAADLVQVLQKLTLRDDLRFLTML | |
| | | FWSNILTPRNLFRTRKAWCPICYQERHQNGLVVYEQLLWT | |
| | | INLITICPQHQKPLLDFCPHCNHESPLLNWRSRPGYCSKC | |
| | | GEWLGANQCLKTFTDGEGSIKLQLEWQYWTANVVGELILA | |
| | | AQCFESAPSKENITKSLNIVIDKVAENNAAAFSRLIGVPK | |
| | | NSLWMWQSTKTLPELNTLLKICYELEISLVEFLTPKNIIT | |
| | | KSFTKVSQKHLQLSRTPRVSPKSFDQYQVKDALLAILAGN | |
| | | EEPPPTMEEVGKRLGHHNRTISRHFPDLCSAISAKCRNYN | |
| | | KACRLKSIEKLCSEVREIVLSLNAQGVYPTEGRVCELMPN | |
| | | PGCFRYKQVRAAFNDARREFGL | |
| | TniQ | MTIYSEHWSLKPLEIPQRSRLFSLEPMAVGTPYAESLSSY | 523 |
| | | LHRLAQAHCLTSQKIVMGEIAPLILKDEDKSELLSKNLSH | |
| | | LLGNSDAKPAINGMREMTEKLVTVLEELTMRQDLRFLTLL | |
| | | SWKGMIYDKGLFRNYRAWCPCCWEEWRQENKTIYEPLSWS | |
| | | FKDVELCLIHKQRLIEECSHCGSRLPVMARFSPAGFCSRC | |
| | | YGWLGQEIKGEEDIEKYRVNIQGISELIALTPQLGYKTIP | |
| | | IELTRKLQLILLVFEQAIGKDLKLLGDLGGIMESLRIASR | |
| | | TNQSQPYHLVKLIIPVCEKAKISVFQLFGLDFKELGKILF | |
| | | GNFSLELKL | |
| | Cas6 | MKPHRYKRGHLTYGALSRICPPLHELNNIGIHPIAGIPTR | 524 |
| | | NNLLELTAQSRLKIRIYHQQIPLIYPYLAGQAFHIGQNFY | |
| | | QLDIPDYQPLISSESVYSRLVVIKGFQDSTSFIEAVQRQL | |
| | | DNLGIQGKIELLTRQDGTPQRRQLTINKEGKQFKVRGFGV | |
| | | KISELNPEDSLTLQEQGIGGKRKMMCGIFVPATRSKEEEE | |
| | | I | |
| | Cas8 | MVTTQPNISLSLHAADTTIMHRVGMTGLYMTLKRLEKQYR | 525 |
| | | LSHERGGHISWILTADTIELFWQGSDFIALSWLINESFQL | |
| | | DDTGLIHLVGLDNDAIDLSQKVHIHEGICAVFLRHNQFYQ | |
| | | AGELVNTELKVEENKVEYQYKSLTWYAHQTFAEKLCQADT | |
| | | QQLRHDYIQITSWLYLGGIVRHARTQNTTKLEEKSEYALA | |
| | | LLFVPVVCHYCLLHIPSEDLKQRKPHRYLVVIPEIKDFED | |
| | | ASQRRWQLQQLETKQLHVSTLGEAGLLYYSLDDIQPESDY | |
| | | YQACQVWLYEKINRASLQRTLMSIEEIEIDKNTLITYQQV | |
| | | QKHFQPNYQKVSGGSGKQVVTFGVALLIQIGLHRLGTLLL | |
| | | WHYHQKIKPKQIFIKVNPIRSLIADNLVKGIHWWSNFWEK | |
| | | LVIEDSKEYLFNQLFSNREGFIIMAENSEEDKQYLIFIKV | |
| | | FQQAMKGNFAKMYAKAEEGKDPPIKKKVERLRAELNYCYD | |
| | | ELSFKEYLSDFLVRGGLNKYFNEHQEEIVLLIKKSPWQEL | |
| | | RIWSLLAIASYKPKNKPTNSDDNSFPNNQNLEEVNDESEK | |
| | | E | |
| | Cas7 | MMSQKKNDNNIPNYYLYGTVLTRYGLASLNHDIRRGNKTI | 526 |
| | | LQKGYWNNGKIYSFVGSSAIRWALRFYLQKQGYLVNRVWD | |
| | | EDEHINRLTSEDFDPEKFYDDDIFGFALLESAETEEDTST | |
| | | TKRKNKQTKTRTPNQRMGALGMNMAVSLTPYDGAVKLGAK | |
| | | SGREKDSTSLHFTEYHATRYQYYFGIDATHLRDFSRILPL | |
| | | IDGIMNLPKVGGSSNIFNYPFCPDSLVFQWTNHFASYISY | |
| | | CFEYCDPKSKEAKLSQEFIDEVECGQIDPSKLWIGGTIVK | |
| | | ELQQLDNFESSPLKKAHIYRNRNEMIEALKTVIKRDLGLE | |
| | | ESK | |
| | Cas5 | MIAPLILYLDVPFTTFRESYAREMGKTYPVPPPATVYGML | 527 |
| | | LSLVGETNVYRHCGVELAIAMLSSPKKSQILRQMRRFKNP | |
| | | DFSHPENLIPCYQEILSNLKCLIWVRSDEEKIQPSLRERI | |
| | | QLAFDHPELVRRFGCLFLGESDQLIKTIKLVSEDYLEGAR | |
| | | QWAIRDNRGRLTLPYWVDHVGSRNTRFLRYRIEEMPSSPP | |
| | | PDLAWTMIQSPI | |
| | end1 | CCATTCAGTAAATAAAGGCTAGAGACAGCTTAGATGTGGC | 528 |
| | | TTTACCCATAACTTTGCCGCAACGGCAAGCTTATGCTTCC | |
| | | AATAAAGGGTGGCAAGGTTATGGTTCCAGTTATATAAGCT | |
| | | GTTCT | |
| | end2 | GGTAGTGCAATAATCTGGTATTGTCTTAACATATCCTTGT | 529 |
| | | GGAAAAGGATAAAATTATTTACATCTTTGCATCTCAATAT | |
| | | TTCGGAGAATTTTCGCTTTTACCTCTGTGCCCTCTGCGTC | |
| | | TCTGCGGTTCGTTAAAGAAGAATAAAACCACAGAGGCGCA | |
| | | GAGAAGCCAGTGCGTTGCGGGGGTTCCCCCCTTTGTAGCA | |
| | | ACTGGCGCGACACAGAGAAATAAGAGGGCAAAGGTGTAAG | |
| | | TAATATTAAGCGAACTGCAAAAATCGAGACT | |
| | CRISPR | TTTGAGCAACGCCTAACGGCATAAAGCCACGAATCACTTC | 530 |
| | array | ACCACTCAACCGAAATGAAACAGACCGAGTATTTTGAGCA | |
| | | ACGCCTAACGGCATAAAGCCACGAATCAC | |
| GCA_002246 | TnsAB | MKEQFEQWVARLQISEAGQKIIEKVRSSEPSRRVGGGSKN | 531 |
| 015.1_ASM2 | | VSGRYPSRKMGVTIQFESHRVELPIIYQLEHDKDVLEFYD | |
| 24601v1_ | | QPPQIKLDYQASNGRRLGVLHTPDLFVIRTNSAGWEECKT | |
| genomic\| | | EQDLKKLAEKNPNRYFYSEENNQWHSLPGEVYANQFGLYH | |
| NOLJO | | RIHSDREINWVLQRNLQFLEDYYRSESLVVEEAIAQSLLA | |
| 1000002.1\| | | IVSSQPGITLAELLNRSTGAKSDDIYTLIIQEQIYIDLNA | |
| 1002138\| | | TPLAEPERCLIFRDEQTASAYRLMVEQPSVSLPAISPVVN | |
| Nostoc | | IVTGATVSWDGKGLNIIHVGETEVILGAENNQLIELKKAI | |
| | | FENLVRQGKITSLQTPEKTAISTESWQRFHQASPEDQAEA | |
| | | LERYKTIEPYLNGHPPENETIPARTIRHWKAKYLIAIQKY | |
| | | GCGYIGLLSHRSVKGNRQRKLPEDTLAIMEKFILEDYETL | |
| | | KQKRMWEVHAALVRACEEAGVIAPSYKAFTKEVQRRTGYE | |
| | | QTKKRQGRRAAYQHESFYWELAITTPRHGDRPFEIGHIDH | |
| | | TELDVELVCSDTGRNLGRPWATFLVDAYSRRLLAVYLTFD | |
| | | SPSYRSCLMVLRICVKRHGRLPQIVVVDNG | |
| | | AEFHSVYFETLLATFECTKKQRPPAKARFGSVCERLFGTS | |
| | | NTQFVHNLLGNTQITRNVRQVTKSVNPKNLAVWTLGLLYE | |
| | | YLCAWAYEVYDTDEHPALFQSPRDAFAAGMAIGGSRVHRM | |
| | | IPYDENFQILTLPTTSEGKAKVQVGRGIKINYIYYWSNSF | |
| | | RDPQIENTSVQIRYDPFNIGIAYAFVRGQWVQCISQYYAE | |
| | | LQGRSEKELKLASIELRKHYSNHTQQSKVSAKNLAEFLAS | |
| | | VEAQEALLEQRSYDAEVKEVFRVIEGGKATTSRNEEPKLI | |
| | | QVTFANTDFQADEDEAIVPETLVVYEEF | |
| | TnsC | MTKSTGFPLELLTRPATERLAYFENYTVAHPRLKEVYEIL | 532 |
| | | MRTIAEPAGASFIFVYGASGVGKTTLRLRVEQKLTELALP | |
| | | KLESDRARVPVVGIEAIAPESRYFNWKEYYTRALITLEEP | |
| | | LIDHKFDYGVRGISRDNFGKINVESKVVAPALRRALENAL | |
| | | IHRHPDVFFVDEAQHFGKVASGYKLQDQLDCLKSLANMTG | |
| | | ILHCLLGTYELLTFRNLSGQLSRRSVDIHFRRYCADSPED | |
| | | VQAFKSVLLTFQQHLPLAETPNLVDHWEYFYERTLGCIGT | |
| | | LKDWLKRVLSDALDREATTITLKDLQKRALSVAQCQKMFK | |
| | | EIQEGERQLSETEADVQNLRSALGLGAKPIVLPEETPKTT | |
| | | RPPGKVGKRKPKRDPIGVQQDVS | |
| | TnsD | MLASVLETYESWNLKKPLIPQRSRLYQPQPVGIGTPYIES | 533 |
| | | LTGYITRIAELHGVLPGVLMTREIAPLVNKIYFQNGANRG | |
| | | FREIFNRSQALNGMGEMAADLVQVLQKLTLRDDLRFLTML | |
| | | FWSNILTPRNLFRTRKAWCPICYQERHQNGLVVYEQLLWT | |
| | | INLITICPQHQKPLVELCPHCNHESPLLNWRSRPGYCSKC | |
| | | GEWLGANQCLKTFTDGEGSIKLQLEWQYWTANVVGELILA | |
| | | SQCFESAPSKENITKSLNIVIDKVAENNAAAFSRLIGVPK | |
| | | NSLWMWQSTKTLPELNTLLKICYELEISLVEFLTPKNLIT | |
| | | KSFTKISQKHLQLSRTPRVSPKSFDQYQVKDALLAILAGN | |
| | | EEPPPTMEEVGKRLGHHNRTISRHFPDLCSAISAKCRNYN | |
| | | KACRLKSIEKLCSEVREIVLSLNAQGVYPTEGRVCELMPN | |
| | | PGCFRYKQVRAAFNDARREFGL | |
| | TniQ | MTIYSEHWSLNPLEIPQRSRLFSLEPVAVGTPYAESLSSY | 534 |
| | | LHRLAQAHCLTSEKLVMGEIAPLILKDEDKSELLSKNLSH | |
| | | LLGNSDAKPAINGMREMTEKLVTVLEELTMRQDLRFLTLL | |
| | | SWKGMIYDKGLFRNYRAWCPCCCEEWMQKNKTIYEPLSWS | |
| | | FKDVEFCLIHKQRLIEECSHCGARLPVMARLSPAGFCSRC | |
| | | YGWLGQEIKGEEEIEKYRVNIQGISELIALTPQLGYKPIP | |
| | | IELTRKLQLILLVFEQAIGKDVKLLGDLGGIMESLRIAST | |
| | | TNQSQPYHLVKLIIPVCEKAKISVFQLFGSDFKELGKILF | |
| | | GNFSLELKL | |
| | Cas6 | MTAILIQSEEYVDLTFKLRGAPIPLDNGYLTYAALSRICP | 535 |
| | | PLHELKSIGIHPIAGIPTRNNLLELTAQSRLKIRIYHQQI | |
| | | PLIYPYLAGQAFHIGQNFYQLDIPDYKPLISSESVYSRLV | |
| | | IIKGFQDSTNFIEAVQRQMDNLGIQGKIELLTRQDGTPQR | |
| | | RQLTINKEGKQFKVRGFGVKISELNPEDSLTLQEQGIGGK | |
| | | RKMMCGIFVPATRSKEEEET | |
| | Cas8 | MIVSTQPKISLSLHAADTTIMHRVGMTGLYMTLKRLEKQY | 536 |
| | | PLSRQRGGHISWFLTADTIELFWEGSDFIALSWLINESFQ | |
| | | LDDTGLIHLVGLDNDRIDLRQKIHIHEGICGVFLRLNKFY | |
| | | QAGEIINTELRFEEKQVEYQYKSLTWYAHQTFAEKLCEAD | |
| | | TQQLRHDYIQITSWLYLGGIVRHARTQNTTKLEEKPEYAL | |
| | | ALLFVPVVCHYCLLHIPSEDLKERKPHRYLVVIPEIKDFE | |
| | | DASQRRWRLQQLETKQFHVSSLGEAGLLYYSLDDIQPEVA | |
| | | YYQACQVWLYEKTNKASRQRTLMSIEEIKIDKNILITYQQ | |
| | | VQKYFKTNYQIIKYKQIFIKVNPIRSLIADNLVKGIHWWS | |
| | | NFWEKLVIEDSKEYLFNQLFSNREGFIIMAENSEEDKQYL | |
| | | IFIKVFQQAMKGNFAKIYAKTEEGKDPPIKKKVERLRAEL | |
| | | NYCYDELSFKEYLSDFLVRGGLNKYFNEHQEEIALLIKKS | |
| | | PWQEIRIWSLLAIASYKPKDKLTNRDDSSLSNNQKLEEVN | |
| | | DDSEEE | |
| | Cas7 | MMTQKKNDSNIPNYYLYGTVLTRYGLASLNHDIRRGNKTI | 537 |
| | | LQKGYWNNGKIHSFVGSSAIRWALRFYLQKQGYLVNRVWD | |
| | | EEEHINRLTSEDFDPEKFYDDDIFGFALLESAETEEDTST | |
| | | TKRKKKQTKTSTPNQRMGALGMNMAVSLTPYDGAVKLGAK | |
| | | SGREKDSTSLHFTEYHATRYQYYFGIDATHLKDFSRILPM | |
| | | IDGIMNLPKVGGSSNIFNYPFCPDSLVFQWTNHFASYISY | |
| | | CFEYCDPKSKEAKLSQEFIDEVECGQIDPSKLWIGGTIVK | |
| | | DLQQLDNFESSPLNKAHIYRNRNEMIEALKTVIKRDLGLE | |
| | | ESK | |
| | Cas5 | MIAPLILYLDVPFTTFRESHAREMGKTYPVPPPATVYGML | 538 |
| | | LSLVGETNVYRHCGVELAIAMLSSPKKSRILRQMRRFKNA | |
| | | DFSHPENVIPCYQEILSNLKCLIWVRSDEEKIQPSLRERI | |
| | | QLAFDHPELVRRFGCLFLGESDQLIKTIKLAREDYLEGVR | |
| | | QWAIRDNRGRLTLPYWVDHVGSRNTRFLRYRIEEMDRLSP | |
| | | PDLAWTMVQSPI | |
| | end1 | TAAATAAAGGCTAGAGACAGCTTAGATGTGACTTTACCCA | 539 |
| | | TAACTTTGCCGCAACGGCAAGCTTATGCTTCCAATAAAGG | |
| | | GTGGCAAGGTTATGGTTCCAGTTATATAAGCTGTTCTAGT | |
| | | TTTACATATAA | |
| | end2 | GTGGTTAGGAGGATCTTCTAATACTCCAGTAGTTACTCAG | 540 |
| | | AACAGATGGATAGCCCAAAGTCTCTATCCCATACCAGCAT | |
| | | AAACCGCTTCTGCTCCATTCTAAAAAAATTCGGCGTTTTC | |
| | | CTGCTTTCTATGCTTGATTGGACTCACGGCAAGCTTATCC | |
| | | TTCCAATTTGGACTAGCGGCAAAGTTATGGTTCCAAACTG | |
| | | TCAATTTCATCCAAAATTAGCTGACGCAAGAATGAGGGTT | |
| | | GTAGTGTTGTTGACGGCAAAGTTATGGTTCCAGTAACGGC | |
| | | AAAGTTATGGGTAAAGTCACAAAACTAGTTGACGCACTTT | |
| | | TACCGCTTCAGCAACCAGGGGAATTATAGTACCAGCCATT | |
| | | GAGTGACCGACTAACACAATATCATCATC | |
| | CRISPR | TTGAGCAACGCCTAACGGCATAAAGCCACGACTCACGTTT | 541 |
| | array | TGAAACTGCCTATTGCTCCTAGAGCAGAATTTTGAGCAAC | |
| | | GCCTAACGGCATAAAGCCACGACTCACTGTCCACAAAATG | |
| | | ATATCCCGGTCTGTTTTAGGGAATTGAGCAACGCCTAACG | |
| | | GCATAAAGCCACGACTCACCACATTTCCTGAGTTGCTGCC | |
| | | TGAAGCAAAAAAGTACCCTTGAGCAACGCCTAACGGCATA | |
| | | AAGCCACGACTCACTGCTTTATCCCTTGGCTATCGTGCCG | |
| | | AGTAAAAGATTGAGCAACGCCTAACGGCATAATGCCACGA | |
| | | CTCACTCGTTGAAAAAGATGAATCGCTTGCTAGCGATCGC | |
| | | TTGAGCAACGCCTAACGGCATAAAGCCACGACTCACCGCA | |
| | | ACCAAAGAAACAGCCCGACTCAGAGAAGAGTTGAGCAACG | |
| | | CCTAACGGCATAAAGCCACGACTCAC | |
| GCA_002361 | TnsAB | MKEQFEQWVARLQISEAGQKIIEKVRSSEPSRRVGGGSKN | 542 |
| 335.1_ASM2 | | VSGRYPSRKMEVTIQFESHRVELPIIYQLEHNQDVLEFYD | |
| 36133v1_ | | QPPQIKLDYQATNGRRLGVLHNWKAKYLTAQQKYGCGYIG | |
| genomic\| | | LLSHRSVKGNRQRKLPEDTLAIMEKFILEDYETIKQKRMR | |
| DESSO | | EVYGALVLVCEQSGVIAPSYKAFTKEIKHRPVYEQTKKRK | |
| 1000065.1\| | | GRRAAYKHESFYWELTKTTPRHGVREAHAAGLSPL | |
| 32925 | TnsAB | MAFAKRMPQAYRPFEIGHIDHTQLDVELVCSRTGSNLGRP | 543 |
| \|TPA_asm: | | WATFLVDAYSRRLLAVYLTFDSPSYRSCLMALRICVQRHA | |
| | | RLPQIVVVDNGAEFNSTYFETLLATFECTKKQRPPAKARF | |
| | | GSVCERLFGTSNTQFVHNLVGNTQITRNVRQVTKSVNPKN | |
| | | QAVWTLGSLYEYLCTWAYEVYDTDEHPALFQSPRDGFAAG | |
| | | MAISGNRVHRMIPYDENFQILTLPTTKSGKAKVQIGRGVK | |
| | | INSIYYWSNSFRDPQIENTSVQIRYDPFNIGIAYAFVRGQ | |
| | | WVECISQYYAEFQGRSEKELKLASAELRKRSSNHARQSQS | |
| | | YAKKLAEFLASVEEQEGLLEQRSYDAEAREVFRIIDGGKA | |
| | | TTSRNEQTKIIPANFENTDTPADQDEALIPDTLVVYEEF | |
| | TnsC | MTKSTGFPPELLKQSATERLAYFENYTVAHPRLKEVYDKL | 544 |
| | | MGTIAEPAGASFIFVYGASGVGKTTLRLRVEQKLTELALS | |
| | | LLESDRGCVPVVGVEAVAPESRNFNWKDYYTRALIALEEP | |
| | | LIDYKFDYGVRGISRDNNFGKINVESKVVAPALRRALENA | |
| | | LKHRHPDVFFVDEAQHFSKMASGHKLQDQLDCLKSLANMT | |
| | | GILHCLLGTYELLTFRNLSGQLSRRSVDIHFRRYCADNPE | |
| | | DVQAFKSVLLTFQQHMPLAETPDLVSHWEYLYERSLGCVG | |
| | | ILKNWLTRAFKDALNREATTVTLKDLQQRAWSVAQCKRMF | |
| | | QEIQEGERQLSETETDVQNLRSALGLDTKPITLSEETPKT | |
| | | TRPSRKVGKRKPKRDPIGVQEDVS | |
| | TnsD | MVNPKRMTIHLENWNLKPPKIPQRSRLFSLEPVAVGTPYA | 545 |
| | | ESLSSYLHRLAQEHCLTSQKLVMGEIAPLILKNEDKSELL | |
| | | KKNVSHLLGNSDAKPAINGMREMTGQLVTVLEELTMRQDL | |
| | | RFLTLLSWKGMIYDKGLFRKYRAWCPCCWEEWRQKNTTIY | |
| | | EPLLWSFKDVEFCLIHKQRLIEECPHCGSHLPAIAKLSPA | |
| | | GFCSRCYGWLGQEIKGEEEIEEYRVKIQGISELIALTPQL | |
| | | GYEPIPIELTRKLQLILLVFEQAIGKDLLLLGDLGRIIES | |
| | | LKIASKTNQNQPYHLLKLIIPVCEKARISVYQLFRSDFRE | |
| | | LGKILFENFGLELKL | |
| | TniQ | MEKELATLVNKKYGSTNLHKIYKHTTALNGSGVMALDLVQ | 546 |
| | | ALQKLTLRENLCFLTLQTWCKLFPSRNLLRPVRAWCPICY | |
| | | QEWYEKKQLIYEPLLWSLDVVEICPYHNYKLIVECSHCHQ | |
| | | KNTTLAWR | |
| | Cas6 | VKLASWNHNFADSSFWNDKPAVSSIEYRKQERAEGVYAGV | 547 |
| | | GDKFSSMTALLIPSEEYVDLTFKLRGAPIPLDNGYVIYSA | |
| | | LSRICPSLHELKSVGIHPIAGIPTRNNLLEIAAQSRLKIR | |
| | | IFHQHIPLLYPYLAGQGFHIGKNSYQLDIPDYKPLISSES | |
| | | VYSRLVVIKGFQEPSNFIEAVQRQLDNLEIQGKIELLTRK | |
| | | DGTPQRRQLSISKGGKQFKVRGFGVKVSELNPEDSLTLQE | |
| | | QGIGGKRKMMCGIFVPATRNKEEKETIT | |
| | Cas8 | MIATQPKISLSLDAADTTIMHRAGMTGLYMTLKRLEQQYP | 548 |
| | | SSLQRVAYVSWLLTTDTIKLFWEGSDLVALSWLIKESFKL | |
| | | DDTGLIHLAGLENDEIDLSHKIHIHEGISAVFLRHNRFYK | |
| | | AGKLVDTELTLEEQKVEYQYKSLTWYAHQTFAEKLCDTDT | |
| | | QKLRCDYVKITSWLYLGGIVRHAKTQNITKLEETPAYAFA | |
| | | LLFVPVVCHYFLFHIPSEDLKEKKPHRYLMLIPEIKDFED | |
| | | ASQRRWRLQQLETKQFHVSNLGEAGLIYHSLDDIHTEVDY | |
| | | YQACQVWLYEKMNQASRQRTLMGIEEIKIDKNTLTGHC | |
| | Cas7 | MMSQKKNDNNIPNYYLYGTVLTRYGLASLNHDISRGNKTT | 549 |
| | | LQKGYWNGKVHSFVGSSAIRWALRFYLQKQGYLVNRVWDE | |
| | | DEHINRLTSEDFDPEKFYDDDIFGFALLESAETEEETSTT | |
| | | KRKKKKTKVSSQNQRLGALGMNMAVSLTPYDGAIKLGAKS | |
| | | GREKDSKSLHFTEYHATRYQYYFAINATHLKGFSRILPLI | |
| | | DGIMNLPKVGGSSNIFNYPFCPDSLVLQWTNHFASYISYC | |
| | | FEYCDPKSKEAKLTKEFIDEVECGQIDPSTLWIGGTIVKD | |
| | | LQQLDNFDNSPFKKAHIYRNRNEMIEALKTVIKRDLGLK | |
| | Cas5 | MIAPLILYLDVPFATFRKSHAREMGKTYPVPPPATVYGML | 550 |
| | | LSLVGETDVYRHCGVELAIAMLSSPKKSRILRQMRRFKNA | |
| | | DFSHPENVIPGYQEILSNLKCLIWVRSDGEKIQPSLRERI | |
| | | QFAFSHPELVRRFGCLFLGESDQLIKSIKLVSEDYLGEAR | |
| | | HWVIMDNQGWLTLPYWVDHVGSRNTRFLRYRIDEMDKLSP | |
| | | PEKAWTMIQSPI | |
| | end1 | TTTTAATAGCTTATGCTTCCAATAAAATGTTGTGACTTTA | 551 |
| | | CCCATAACTTTGCCGCAACGGCAAGCTTATGCTTCCAATA | |
| | | AAATGTGGCAAACTTATGGTTCCATTTTTTCGTGATAATT | |
| | | TTTAACATATATTCCGTATTTCATATTGTATTACGAAGTA | |
| | | ACACAATAATTATGGTTAGCTTGGTGATTTTTTACTTATA | |
| | | AATACTTGACTTTTTCCAATTTTGTGCATTAAGTGCGTAT | |
| | | TACATAATGAAGTGCGGAATGTCGGTTTTAAGCTTCACAA | |
| | | CCCAAGT | |
| | end2 | GGTTATGGTGTTGTTGGCGGCAAAGTTATGGTTCTAGTCG | 552 |
| | | CGGCAAAGTTATGGGTAAAGTCACAAATGTGGCAAACTTA | |
| | | TGGTTCCAATTTTTTTTGATAATTTTTAACCTATATTCTG | |
| | | TACCCTCACTGTCGTAATCACGGATTTATATGGATTAAAG | |
| | | GATTACACGGATGATTAATAGGAGAGTTTTTATGGGTTCG | |
| | | TGTAATTTATTGAATTAGTATTTTACATGACGAGGCGTTT | |
| | | GAAAGTTAG | |
| | CRISPR | TTGAGCAACGCCTAACGGCATGAAGCCAAGACTCACAACT | 553 |
| | array | TTACATTAATTTTAGGGCAAGCTGGAATTAAGTTGAGCAA | |
| | | CGCCTAACGGCATAAAGCCAAGACTCACAATATATGACCG | |
| | | CATTGGGGACAAAATCCAGTAAATTGAGCAACGCCTAACG | |
| | | GCATAAAGCCAAGACTCACCTACCGATTATCCAGGAGAAG | |
| | | CTTGTCTGTATTTTTGAGTAACGCCTAACGGCATAAAACC | |
| | | AAGATTCACCCATCATAGCATTTGGCTTATTCATACCTGA | |
| | | TGCTTGAGCAACGCCTAACGGCAT | |
| GCA_000147 | TnsAB | MVKANPGIYLSELQQKIEIASIDDFHVLILTDKIYVDLFA | 554 |
| 335.1_ASMI | | IPLSCPEQVQVFLSATEAFTHSQLTTIVPSNWETFNSPLN | |
| 4733v1_ | | VAIGTQISWDGQPWTIVNLGNNYVGLQGENNTFQHLPNSV | |
| genomic\| | | FSTLVHQEKIVGLSSPNFSSLNPKIEEIFSYTSQADLQEA | |
| CP002200.1\| | | HRRYQQIEAFLKGTASTPTNRTQRRWLASYRKAEQLYGRG | |
| 473846\| | | FIGLIPQHRHKGNSLSKMDKDVHQLMEKHIQEEYETHKQP | |
| Cyanothece | | SIRHAFQAFKELCAHTGLRPPSLETYRRSIRNRPVVEQVK | |
| | | KRQGSRAAYQEETFYEFLDRNTPIHGERPFEIAHIDHTLA | |
| | | DVQLLSLIMLNLGMEMNEGEHQANLGKAWVTLLIDAYSRR | |
| | | ILAAYMTFDSPSYRSNMMVLRICVQRFGRLPQILVVDGGR | |
| | | DFQSGNFEMLLAYSHVTKKERANTRDGSVIESFFGVADRE | |
| | | FWHNLKGNTQIMKKVRQVTKSVNPKYHAVWTLDKLYRYFC | |
| | | EYCYEIYDTCPHPTLRMTPREAFEIGLARGGLRGHLLIPY | |
| | | EEFKLLSLPAPTDNDGMRRITPKGIKINYLYYGHPSFERV | |
| | | RNTRVAVKYEPFDVTIAYAYIKGEWVQCRSGYIRELQGRS | |
| | | VKELITASDELKKLNQLQNQQFSDITGKNLAQFFTRIERE | |
| | | EAILTPSWREAKKAVQAQHLRDEELKEVLNEIEGKPSTKE | |
| | | TSNDSSEIDLFTFENREYIALSSSISPPSPIQQTQVDEDD | |
| | | DNDEFEELFEPLEEW | |
| | TnsC | MALQGFPPELLNQSPQKRLDFFKSPDITFMHKILHKTYNQ | 555 |
| | | LYRKVCKPAGASTILLIGPSGVGKSTLMDLLKKRILEESL | |
| | | PQMELEPAWIPIICVEADAPGKGTFRWKKFYQQVLLEVDE | |
| | | PGIKYKIDYNKINYEEEGIRRGNNGRLIIGARATEDSLKI | |
| | | SMKQALKYRHPYTLAIDEFQHIGIRANEDLLKAHMDCLKS | |
| | | VVNGTKIPLTGFGTYELLEFLELSPQLSRRTLKIHFHRYR | |
| | | WENDDECKEFKRVLYNLIHRMPFPNQPTITKQIWEFCFER | |
| | | SIGNIGTLIDWLTDAYDLALANDAPSLSFDYLKETAKSRL | |
| | | DCEQMIEEAIEGEARLEETEDSTNRLKVLLGMKSASKPSK | |
| | | SNANSTDPNSTAQKTKKDVKNKPFKRKPVRDQVGGQDET | |
| | TniQ | MKPDSYEPLEWYDLKLLILPKFLYLIFLTINFSSSVFASP | 556 |
| | | ENLAKAQPHQQKRISPRSCDLNQIENFLNQHLEQSPDLIS | |
| | | PLTIIAKNLKVDKKFISRYFRDLCQKIVAKRLSYKKDCYL | |
| | | DSLKQCCNEVEQVTKMLFKQGEYPTED | |
| | TnsD | MSNYNELDDGLEIVSLKSPETPKRSRLFSLEPVGIGTSQT | 557 |
| | | ESLSSYVNRLAEAHCVKSQKLIMLEIAPQILGKDYQSPLH | |
| | | SKDVSSLFGNTDAKPALNGMRDMKLLLVQALEKLTQRQDL | |
| | | KYLTCLSWKEVINKRGLFRQYRAWCPQCYEQCKQDKVSLY | |
| | | DPLLWSFKDVKFCLHHQCQLVDECPKCGSHLPVIANFLPL | |
| | | GHCFYCGEWLGDNKNKNPKCNFKNFPESLLIIKNIGDLIA | |
| | | VTPRLGSQPTLDEFIQKLQLILFCFEKVISQDLKHIKVLG | |
| | | KIIEHLKLNLSQHGDKPLNLIKIIIPVCSKAHISVSELFL | |
| | | EDLTGLSKILFDNFQINYQLPIL | |
| | Cas6 | MEAISIHPIAGIPQPLNQLRLTNRSRLRIRLPIDQIPLVY | 558 |
| | | PLAGQTITIDWGIERVSHQAKFQLGIPYPTALQPASTLYS | |
| | | RLVLIHRAETPEAVLEVAQRQLNRKGIKGTIELPTRANGE | |
| | | VQCRLLTIKKKHQLFRLRGFGMKVTKLSEKDSIKLQQSGI | |
| | | GGKHKMMCGVFVPTWRETTEKDENSNVLVIYSGR | |
| | Cas8 | MTGLNPPSIELINQIHLHFSIGATFLRHCKFCKYGKQTVQ | 559 |
| | | EIIIEGKQRKLTYKPIKWYAHQTFAKQLCQAGQLLTDYIS | |
| | | IISWLYLGATVRHAMLDKYNKIQEKPEFALVLLFVPVVCQ | |
| | | YFIFHPYYEKTDNNNPEKYLIVIPEILDLEEAAYQRWQSG | |
| | | NLAYKNYHVSSLGEAALITYSWHEVETQRSCERTCQVLLY | |
| | | EKFNKDSHQRSLIETRDITINLNILNTYFLIKQFFQENQF | |
| | | DSYGKNRWIKVNFIRGIIADNLVKGVPWWSDFWKILNQED | |
| | | IDGELAQQLIDNKEGLIAMIEQDKEMEDYKLFVQAFHEAL | |
| | | RRNYAKIQKRTQEGERARFDREYERIRGELNRCYDEHSFS | |
| | | DFLADFLARAGFLSTLYDEWDSVLPFITESVPWQKARNIA | |
| | | LFALATYKPVSKNQLEGE | |
| | Cas7 | MFYLFGTVITHYGPASLNHEKARGNVSPLQKTYWDGHIHS | 560 |
| | | LVSGDAIRWGLRYTLQKEGYPINRRWNEDEFTNDLVNENF | |
| | | DPVEFVDDDLFGYMYAEAAKEDIQEEEPSSTGKERRNQTK | |
| | | GSIVQRLGALGVNRGVSLIPYTGALTFNAKSGKIKDRTAL | |
| | | HFLEYHNTRYQYTFALDPNHLKVKERILAFIDALMNIRKV | |
| | | GGNNNVFCYKFTPESFVLCWTQRETPGIFYCFEEGDLIPK | |
| | | MKSEVLEDIEVGDIKASELWIGGRVAKGLKIKNAHIFRGK | |
| | | EQAIEDLKKVIVKDLELSYPY | |
| | Cas5 | MSSIAVYIDVPFASFRQSHSREYGKTYPVPPPATVYGMLL | 561 |
| | | SLVGEWDVYLHCGVQLAMAMISQPQISKVLRRIRRFKVKN | |
| | | FSDDRNTNPEYQEVLSNIKFIVWVASKNEQAQPTLRERIE | |
| | | QALIYPESVKRVGCLYLGESNDLVNKIKLISNDYCFEERW | |
| | | WLMQDEDGLIILPYWVDHVGSKNTRWLRYGLKKISVEFPP | |
| | | ESCWTTIQAIR | |
| | end1 | CGTCCCTTTTCTTTGCTCTCTAATTCTTTCATTGGGACAA | 562 |
| | | CAACCATAAAGTGACCAAACTGACAACTATAAGTTGACCA | |
| | | GAGCAATTGTCACTTAAAGGATAAAGTGGCCGCTTTTAAA | |
| | | GCATAAAGTGACCGTCCCTGGAATTTAGAGTAAAAGATTG | |
| | | CCTATAAGCATAATTAACTGGCTTTAGTTTTTAAGAAAGA | |
| | | GACGATCACCTTTTGTTACGGAATAAGTTCTAGCGCCCTT | |
| | | GTAGTTTAGGTTTTAGACAGCGGCCACTTTATCCTTTAAA | |
| | | AACGGCCACTTTTTACTTTAAGTAACAGCAATCCCTGAAA | |
| | | TGCTTAGTTTTTCGTTGGCGAATTCAATTGAAAATGTACG | |
| | | CTTGACAATCATAAGTTGTCCGAAAGTCCAAAAAACAACC | |
| | | ATAAGGTGTCCTTGAGTTCCAGCGACACAATGTTTACACT | |
| | | CTCTACAAGACAGCAACAAGACAGCAACCGAAGCAAGTAA | |
| | | TTAAGAATTTTTTATTATTTTTATTAATATTTGAGCTTAA | |
| | | GAAGATAGATTAAAATTATGTTTGCCAAGCACAATTGTTA | |
| | | AAAAAGGGCATTTAACGATA | |
| | end2 | GTTAGGATTAAAATTAAATAACTAATTTATTCTTAACTCA | 563 |
| | | AGTGACATCAATAACAACGATAAGTTGTCCACCTTCTTTG | |
| | | ACAACGATAAAGTGACCAATTTGGTCAACTTATGGTTGTT | |
| | | GTCCCATTCATCTAAATCGGTCGTCCAACCGACATAATGC | |
| | | TGCGCGGTATGCTTGGGAGAAATGGGACGGGCAAAATGCA | |
| | | AAATATAAACGTATCCCATGATTTTTACTTTTTAAAAACT | |
| | | TCATTAAGCAGCAATGCGGAGCATGAAATT | |
| | CRISPR | TAGATAACGCCATTAGGCAGTTAGCCATGATGCACAATGG | 564 |
| | array | AACGGGCAAAATGTAAAATGTAAACGAATCCCTGAGCAAC | |
| | | GCCAATAGGCAGTAAACCATGATGTACTATGCTTTATTTT | |
| | | GCTATTGATAGCCAAGGAACTGTTCAGTATTGAGCAACGC | |
| | | CAATAGGCAGTAAACCATGATGTACGACGCGGTTTCAGCA | |
| | | ACTGAGGCGGGTTCAGCAACGAATCAAGCCCGATTTTCTT | |
| | | GAGCAACGCCAATAGGCAGTCAGCCATGACGCAC | |
| | TnsAB | c | X |
| GCA_002355 | TnsC | MSSEREFPLELLKANKEHRLNYYDEYTMAHPFLDRAFEDL | 565 |
| 455.1_ASM2 | | KPLVRHCGETRLIFIVGPTGVGKTKLRQLTEKWILEKLWE | |
| 35545v1_ | | SIRSNMGHLAVASVEAVLQKSGLFNAKDHLKRCLYALHEP | |
| genomic\| | | EEFIKNKINYGVDGIYRTDEGKLAIKSRILETDLGWALEQ | |
| AP017375.1\| | | ALKHRHPQIFFIDEAHHMLAVASGRKLTEVPEAIKSLANR | |
| 5319768 | | TEVLHGLIGTYDLLTLHDIGDQLSRRSLYIHLPRYDAKFI | |
| \|Stanieria | | EDREDWQSIVWNFQTQIPIEEEPDFVSDWEYLYERSLGCV | |
| | | GILKNWTRNAFADAMEDEAKTVTLKHLERRALSIGQCRNI | |
| | | LKKIKEGENNYAAIEGEVEKLRTELELGIEPISRTQPISQ | |
| | | SYSGANQTASQKPKSKQAVGQRRAKRDRVGIDKDAG | |
| | TnsD | MQDKIFKKYRSLKLQCTPERSSKLYSITPIGIGNSLIESL | 566 |
| | | TSYISRLALAHCVYPGILMERVVSSVIDKKYSSADIHKLY | |
| | | SFTDAINGTGVMGLDIVNALEKLTFQNRLSLLTLTNLSEL | |
| | | IPSRKLLHDYKLWCPQCYRNCHTRSEEIYEPLIWKLKTVA | |
| | | VCSIHNLPLQEFCPYCLKKNYHLAWKTRPGYCSQCGQWLG | |
| | | ELKAYDQSLLAKEKDETLNWHLWVSKNLEELLIKNSSRDV | |
| | | TWSKNTISQSLMRYAQQNAEGNIAALARQLEMPKNTVWLW | |
| | | CKGKNQPTLEMLLRICYGLKVSVWNFLTQENLIESEKVHL | |
| | | IASPPELKSKAKSKVLELDKIKEYLEQVIKKETIPPPSME | |
| | | QVARDLQFQRRTISRHFPELCRVISANYTKHRKATHRQAI | |
| | | ESSCQEVREAVKQLHSEGKYPSHNKVEKLISRPGLLRYEE | |
| | | VKKAFTKAKQELNFK | |
| | TniQ | MAEEGKLNRYKHLIFSNPIDFPETSCLYSLESIAVGTPYT | 567 |
| | | ESLSSYLNRLAQEHCVTPQKLIMGEIAPTILGDKYAPEIF | |
| | | SKNVSSLFGNSDAKPAINGMREMTRSLVDALEKLTLRQDL | |
| | | RFLSCVTWKGIISDRGLFRQYKAWCPLCFETWRQARKLIY | |
| | | EPLLWSFREVDFCPEHQCELCDRCPHCDSFQKAISDFSVP | |
| | | GYCSRCRHWLGKSDNTKSSLQEDFKQNHFILQGIGDLIAL | |
| | | TPQLKHQPNLKSLKHKFKLILFCFERAIHHDLGQYVVLIK | |
| | | LIEKLKIDLKQNYFKPINLTEIIIPVCQQAKISVSQLFEN | |
| | | NYENLAQILAQNIETDYKIL | |
| | Cas6 | MAIAQVGREEQHEEIELIQNPYIELAFPVMGTSLPIDHGY | 568 |
| | | QLYSALKYRLMQLKDWDDISIKTISGKCDRHKRNEINLTN | |
| | | RSKLLVRLPSEKVPFVYSFSGKSLTIGNHKIRLGIPNMNF | |
| | | LQPKSKMRSHIVVIRGYEEPKTFLEAAKRQLDALNIQADI | |
| | | KLISNQDGTPKRKTIAVKQTLVGFGIEANHLSEADSITLQ | |
| | | EKGLGGKHKMGCGVFV | |
| | Cas8 | MIVKADEPKIEISLSDPGMTMLHRAGVAGLYMSLKALAKR | 569 |
| | | YPTLKSRQGNFQWTLTKNSISLNWKGNDYEALDWLFSESF | |
| | | QISSDGLISLTGLQSPNWETQLAIHVGIKNTFLQHNQFFR | |
| | | SAEDAIESLTIDNLEVQIEYKKVKSYAHQYYAEQLCPIER | |
| | | LNFKRIFTKLRLFIFIHYTLIGFLFLYEIRQGGNLEQNVV | |
| | | GITGWLYPGATVKHYAYQKETQFTETLERAIALLYAPVAC | |
| | | LYFIAPKSYLYDTKTQYCLVIPEITDLKSYPRQRQKLNNW | |
| | | NYQQFLASGYSDAGFRLLTQQATLRILQQNNLKRCQIITF | |
| | | GQTQWTRFQKIRKNVEVIELTDKIIKNYRLCDRYFKNRVV | |
| | | EWEDGNFIAASIVRELIAENLARGFSWWHNFTHTVRSNKL | |
| | | FRLISYEKKGLQQMVKNTDWDEEAQKLFVQACHKALHQIR | |
| | | GKLASKAKEDEYVQFERENERIRSSLIRCQNSEDLRHFLA | |
| | | TFWSKAGIISLLSQHWQQLMPLTTKPSNWKLARDLALLAL | |
| | | ASYTTPEGYKQTSQEEKPKDVEDRKPDQEETSSSTVKTQE | |
| | | LSEEE | |
| | Cas7 | MTFYLYGNILTFYGVAANNRGENQGNISTLQKLLWKGETH | 570 |
| | | TKISAEAIRWAIRYYWQKAGYQVNRVWDDEVNDYTWQDPK | |
| | | FNPLDFIDDDLLGFFEAESAKKEPENAPNKSQSENVNNEP | |
| | | QPENAKLENTNQSKSKKKLPKKLKPKGSVTHRKGRLDVTR | |
| | | AISLLPYDGNVTFNAKSGTKTRTSIYGTEFHATRYQFGLG | |
| | | ITPESCQDKSRVLALLDALVSICRVGGNHGRFLFDFAPES | |
| | | IVLRWTSDFTPRFLYCFEEDEMDNICTPELLRQIRSGDLE | |
| | | PTEFWISGKIAENLQGSEYSKVNQFSGIKAMVDALKQKIA | |
| | | CDLQFCLLDQTNRGEN | |
| | Cas5 | MMIALRVDVPIASFPTSRSREYRETYPVPPPSTVYGMLLS | 571 |
| | | LVGETDRYKHCGVKIALALLSEPAKSITLRKTRRFKSQKI | |
| | | DHKENTRPDFQEILTGIEFIVWIDTGDDLAQPDLCDRITG | |
| | | AFANPGSVQRFGLLCLGESRDLVNSIDLLATTDFEQPLQY | |
| | | LIQDDYGYLSLPYWVDRVGSSKTRWLNYSLEALEVQQPPH | |
| | | SAWTKIQAP | |
| | end1 | AAAAATAACGACCGACTCTAAATAAATTTTGCTATTAAAT | 572 |
| | | GAATAGATTTATTGTCATTCCTGCTTTGAGGTCGTGGCTC | |
| | | AAGCGTTCGTGGTCGGCAATTTTGTTGGGCGGACGGACAT | |
| | | TCTTTTTCTTATTTACTCGCAAGCTTGATTGTCACTGGAA | |
| | | GCATAACTTTTCGGCAATTATAACCATAATATTTCCGCCA | |
| | | TCCAATCAAATATTGCTATTTTGACGTTAATTATTTTGTA | |
| | | AAATTTTGACCTTGTAGAAGCATAACATTTCTGCAAGTCA | |
| | | AAAATAGAAACATAAGCTTTCCGCAGGTCTATCTCTCAAG | |
| | | ATCGAGCTTCTAAATTGGTTTTTGTTTTAGGATAATATAT | |
| | | TTTTGCAGTAACTTTTTTCATCTCATCAATTCATAAACGT | |
| | | AGAATCATCTCAAGAGAAA | |
| | end2 | CGCAAAGCGAGCCACTGCGTCAACGCACGATACCAGAAAC | 573 |
| | | CTTTTTAGTTATTAACTATAATATTTCTATCTAAGTATTG | |
| | | ATTATCGTGCATCGGAAGTATAAGATTTCCGCAGTGCATT | |
| | | AGAAGTATAAGCTTTCCGTGGCGGAAAAGTTATGCTTCCA | |
| | | GTGACAACACAACATTTAATAATTGAATTTACAACAGATG | |
| | | GAGCTAACCGGACTCG | |
| | CRISPR | GGGCAACCAGATTAGATGTCGTCAGGCGTTGTGAACAAGA | 574 |
| | array | GTTTTAAGTATGAATTGAAAGTGACAGGACTCGACGGGCA | |
| | | ACCAGATTAGATGTCGTCAGGCGTTGTGAACATCAACGAG | |
| | | ATTATCCGCAGTTATTGTATCCGCAAGGGCAACAAGATTA | |
| | | GATGTCGTCAGGCGTTGTGAACGGAAATTGCCCCAGGGGT | |
| | | GGCTTATCCCAAGTTTGCTGTAACCAGATTAGATGTCGTC | |
| | | AGGCATTGTGAAA | |
| GCA_000021 | TnsAB | MLSDTEFQTWCDGMQLSQRQRELITQVRTSPPIRKVKGSA | 575 |
| 805.1_ASM2 | | RNVHGRYPSKKMGTTIQFESHTVELPALCEFYEYDDSVLE | |
| 180v1_ | | YWDQPYKFTIKCAPEGRQATTITHYPDFLVLRKNSCGFEE | |
| genomic\| | | WKKETKLEKLSEKQPYRYQKQEGIWIDTIVGEYLENLGYY | |
| CP00128 | | YCVRSDREIDWVKYRNQKYLQSYKHGYLDQQYIIDTAVEE | |
| 7.1\|4679413\| | | ELKDIINHNPGIDLTTLLNKAQNATIDDINTLIALEKVYV | |
| Cyanothece | | DLSVVPIEEQLDKVHLFRDKATAEAYITATHNYSEPITGS | |
| | | VQIVNLKVGSSFLLDGKSLTIDHVGDSKIILKGEQGIIRW | |
| | | THAEFQQLLELGEITHLETEEKPALDEEGWQYFVEASPKA | |
| | | LETANQRYSAIKPLLDGETYSSLDIDISARTLRHWKAKYQ | |
| | | KAQQDYGCGFLGLIPQSKGNPTPRYSDEDVEFVDKIIEEQ | |
| | | YETFKQKNAWQTYLRLRDRWKESGRTSPIPSHTFYYERIK | |
| | | KRNSYQQTKRRMGSRAANNLLRPWLIELTTPRHGSRPFEI | |
| | | CHIDHTPLDVECLCPYSNKNLGRPWVTGMIDAYTRRILAL | |
| | | YLTFDEPSYRSCMMVMRICVQRFGRFPELIVVDNGKEFSS | |
| | | TYFETLLARFEATKKHRPKDVPKFSSIIERWFGSQNREFI | |
| | | NNLRGNTQIMKHVRLVKKENNPKNLATWTLDELYDYLAFG | |
| | | YAYGVYDRMQHPALEGMSPQQAYELGLAKTGHRPHQYIKY | |
| | | DEQFKILTLPTTQKGTAKVIPGTGVRINYQDYWTDEFYRV | |
| | | ENQSVPVRYDPLDYGVAYAYINNHWVKCLSNYHLRFQGYS | |
| | | EKAVAIATTICRQKRKQSNQSLYVGANELVSLLKNAEDYE | |
| | | ELMLQIRKDQSAKLVYNLIEGNLSSAVLNPADIEHPFLQD | |
| | | DSKVDNNFSNLDEDILQPSLSTTTQSDNEDDDIGFYSNEE | |
| | | LW | |
| | TnsC | MTEKRLFSWELLEDSTENKLKYFKDVIIPHRNIKTILEQL | 576 |
| | | LKNAIEPDDALVYLVFGVTGVGKSRLKAEFEKRLLRHFEA | |
| | | EIIANPGSLVVGGIEVDGAEGGKFNYSDYYIQVLESLQEV | |
| | | LIDYKENYEIDEDDNEDNLRGDHEGKNSKALRRTMQKVFT | |
| | | HRQLKAYTLDEAQHLFDVAGGRQINVQMNWLKSIANKTQT | |
| | | VHVLFGTYDLLKCQEVNGQVGRRSEDYYLPPYYLDNSDDQ | |
| | | KEFKKAINTLQRHFPVENEPELNEKWEYFMEYSIGCIGIL | |
| | | KSWWYRALKNALDDGAKTVRIKDFQARELSSGRRKTIKKE | |
| | | LEDGERRLAALYFEEKAKKPKSESQASSKSSTRKVGERKA | |
| | | IRDLVGVNQEG | |
| | TniQ | MSIYEEFWSSKPLKLPPRSRLFCLKPMGVGTCYTESLSSY | 577 |
| | | VNRLAQEHCLTSQKLIMAEIAPLILKNEDKSDLLKKSVSH | |
| | | LLGNTDAKPVINGMREMTGELVRVLEQLTMRQDLRFLTLL | |
| | | SWKGMIYDRQLFKNYRAWCPCCLEEWKGEKKVIYEPLLWS | |
| | | FKDVEVCLLHKQRLIEECPHCNARLPVFARLSPVGFCSRC | |
| | | RGWLGDKKEEMEEVEPHRVNIEGIGDLIAVTPKMAYKPIP | |
| | | IELTRKLEVILLAFEEACGKDITLLGDLGVIMEQMRIATK | |
| | | QHQNKPYHLVKLVIPVCEKANIRVSELLLLNFKALSDRVF | |
| | | ENLELGMRL | |
| | TnsD | MDIDINKIQPYTNDELWSPEKFPMPPRSRLHHLQPMGIGT | 578 |
| | | PMVESLTSYVTRLAHSHGVHVGTLIYKEIIPCISKTYKTT | |
| | | NLLCLRNQTGAINGCGLLAEDSVQALSELTLYQNLSNLTM | |
| | | LNWKNIFPNRKLIRNHKAWCPFCYQEWRTNNQIIFDPLIW | |
| | | QIEVIRLCSIHQYSLQTLCPSCKKSVSVLSPKNQLGYCSN | |
| | | CSNWLGNIEDYLNTSLSIHTKFKDKSYFLWIADCLGNLLS | |
| | | FPSTIKSPSKKQISQIIQAIIHQSTKGNIAEFARWANMPK | |
| | | NTVWMWVKGKSLPQLSRLLALCYLCRVDLLDSIINEGNIT | |
| | | NMILHQKSIPSSVNERPKIFKNTLNHAQIHAALSEAFQET | |
| | | HPRPMTQVAKRLGISNKVLRRHFPELCKKISQRYLIYKKQ | |
| | | SRLERIQKVCIEVEKAVKQLQQQGIYPSEQRVALHIGQPG | |
| | | CFRDKEVREVLNRTRRNWRLLDT | |
| | Cas6 | MTDTVINSEEHLDMIFKLRGAPIPLDNGYVIYSALCRICP | 579 |
| | | TLHELKDVGIHPIAGIPTQNKFLELTPNSCLKIRIHHLQI | |
| | | PIIYPYLTGQTFEIGQESYQLNIPDYQAIRSSDSLYSRLV | |
| | | VIKGYQDSSSFLEAVQRQMDSLAIQGNVELLTRQNGTPQR | |
| | | RQLTIRKQGNEFKIRGFGVKISELSPEDSLTLQEQGIGGK | |
| | | RKMMCGIFVPATRPKDERKTP | |
| | Cas8 | MTVATQSKISLSLTACDTTIMHRAGMAGLYLTLKRLEEKY | 580 |
| | | PDFRQREGNLSWSLTPDTIDLFWEAIDFSALDWLLKESFQ | |
| | | LDDNGLICLTGLDDYSELRQKIELNEAIKAVFLRHNKFYQ | |
| | | AGEAKKISFTVEEREVSYSYKPLIWYAHQTFAKELCDTDT | |
| | | QQLKQDYLQITSWLYLGGIVRHARADKKTKLEEKPEYALA | |
| | | LLFVPVVCHYCLFHLPSEDVNSRKPHRYLVVIPEINNFED | |
| | | ASRRRWRLQQLEPQQLHVTNMSEAGLLYYSLDEIQANENY | |
| | | SQACQVWLYEKMNKASYQRVLTMVEEIEIDKEMITTYQQV | |
| | | KQYFQPNYQHIYPNNILIEVNLVRSLIAENLRQKQPWWFN | |
| | | FWKKLIDEDSKNYLFKQLLSNQKGVKFMTKNSERDEKYLA | |
| | | FIEVFQQAMRANFAKIYAKTERGKNPLFQKKAERLRAELN | |
| | | CCYDEISFQHYLADFLARGGLNKPLQGQKREVLLLIQQVP | |
| | | WEKLRIWALLGIASYEPKPKNLQELEGIKDESEEE | |
| | Cas7 | MNQKKNKIPNYYLYGTVLTRYGLASLSHGMRQGNKSILQK | 581 |
| | | AYWDGKIHSLVGSSSLRWALRFYLQEEGYPVNRVWDKDEH | |
| | | INRLTDDNFNPDQFYDDDIFGFALLESVEEETVEDKTQPS | |
| | | TRRRGKRKKSGTTAQRTGALSMNNAISLTPYDGSLKLGAK | |
| | | SGRDKDSTSLHFTEYHNTRYQYYFGLNATHLKDCSRIFPL | |
| | | IDGIMDMPKVGGSANIFSYPFCPDSLVFQWTNHFASYISY | |
| | | CFESVDGKGRNIKLTQDFINEVECGQINPDELWIGGAIVN | |
| | | DLRELENFEKSLLKQIHLYRNRNELVADLKEVIKQDLGLK | |
| | | DSQ | |
| | Cas5 | MNTPLVIYLDVPFVTFREFHAREMGRTYPVPPPATVYGML | 582 |
| | | LSLVGETDVYRHCGVELAIAMLSEAKKSRILRQMRRFKQK | |
| | | DFSHAENVNPSYQEILSNLKCLIWVRSEAEMMQPSLKERI | |
| | | EFTFERPELVRRFGCLFLGESDQLIKTIRLVSEDYREGVR | |
| | | RWLIRDNGGRLTLPYWVDHLGSRNTRFLRYRVEEMNQLSP | |
| | | PDFAWTSIQSSV | |
| | end1 | TATCTAATTCGGTGGGTTACGGCAAGGATGAAAATTTATT | 583 |
| | | ACTTTTTCCCTAATTGATAAAAACCCTCTCTCACCTATCA | |
| | | ATTGCATTCAAAATCTGTTTAATAATTTTAGGATGGAGAA | |
| | | TTTCTCCAGAATGAAAAGGAATAACCACTCGAATATTATC | |
| | | CTTAAAATAAATTCGGTGACTTCCTTGAGTTCTTAATAAA | |
| | | ATAAAACCAGCATTAAGGAGTAACTTTTCTGCTTCTTTAT | |
| | | CGGTTAATCTCGGAAATTTAGGCAACGTTAACCTCTATAC | |
| | | TCATTGTTACAATTTCTCGATTAAGTAAATTATGTTTTTC | |
| | | CACCTCTGATAAAGTAGATAAATACAGTTCAATGGCTTCT | |
| | | TGTATATTGCGTTTGACTTCTTCTAAAGTATCTCCTTGAC | |
| | | TTTGACACCCTTCTAGTTGAGGGGAGTAAGCATAATAACC | |
| | | ATCTTCATCTTTTTCGATAATAACACTGATTTGATACGAC | |
| | | ATCTTTGTTAACTGCTAGATTCATTCTTTCATAATAACAT | |
| | | CTCTTTGGGGTAAAACTACCTCTATATTCTTATTTCCTCA | |
| | | CCCTTCTAACTCAGCAATATTATTTATTTCATATTGTTCA | |
| | | ATATTGTTTTCATTTTGTTTATTTTCG | |
| | end2 | ACTATTTGACTTAAAATTTTTCAGGCATAGCTTTGCTGTC | 584 |
| | | AGATTTTCAGGCATAACCTTGCCGATGCGGCAAAAACAAA | |
| | | CTTTAAATAATAGAAAGTCTCGCAGCATCTCTTAAAATGG | |
| | | T | |
| | CRISPR | ACACCTAACGGCATAAAGCCACGAATCACGTCAGTTAATT | 585 |
| | array | GGGACGAAAATCCCTGGATATTTTCCTTGAGCAACGCCTA | |
| | | ACGGCATGAAGCCATGAATCACATCGTTGAGCCTCTTTAA | |
| | | CACTTAGCCCGATTTTTTAAGGATTGAGCAACGCCTAACG | |
| | | GCATGAAGCCATGAATCAC | |
| GCA_002896 | TnsAB | MLYDVDFQAWCNSLPLSQQQRDLVNQIRTSPPARKVKGGG | 586 |
| 875.1_ASM2 | | RNVHGPYASSKMGRTIQFESHTVELPAMTQFYEYDDQVLE | |
| 89687v1_ | | YWDQPIKFSIKCSPQGKQATTISHYPDFFVMRKNCCGFEE | |
| genomic\| | | WKTEKRLEKLSEEQPYRYQKIEKQWVDVIVQEYIESLGYY | |
| CP023278.1\| | | YRLRSDSEIDWVKYRNQKYLQPYKQGYLKQQYILNDQVEA | |
| 6990729 | | NVQEIIVNYPGINLTNLFEKAKNATIDDINTLIALEKVYV | |
| \|Nostoc | | NLSEVALVEQEKVHLFRDQATAEAYITATHDYCEPVSSNV | |
| | | PIVELKVGSSFLLDGKSLTIDHIGESKIIFRGEQGIIRWT | |
| | | YAEFQQLIELGEISNLQTENHTTLDEEGWQYFLEASPKAL | |
| | | ETANYRYAAIKHFLGKEADNSQKYDLSERTLRDWRAKYRK | |
| | | AQQKYGCGFIGLIPQYKGNPTPRYSDEDLEFIDTVIEEQY | |
| | | ETSKQKNVWQTYEFLKDEWQKVGRISPVPSHTFYYERVKK | |
| | | RNSYQQTKKRMGSRAANNLLGPWLIQPTTPRHGDRPLEIV | |
| | | HIDHTQLDVECICPYSGKNLGRPWVTGMIDAYSRRILALY | |
| | | LTFDNPSYRSCMMAIRICVQRFGRFPEWIVVDNGKEFSST | |
| | | YFETLLARFEASKKHRPKDFPKFSSIIERWFGSQNTEFIN | |
| | | NLRGNTQIMKHVRLVKKANNPKSLAVWNLEELYDYLAFGY | |
| | | AYGVYDKAEHPALEGMSPQKAFELGLAKTGHRPHQYIKYD | |
| | | EQFKILTLPTNNKGMAKVIPGQGIRVNYQNYWTDEFYSVE | |
| | | NQCIPVRYDPLDYGVTYAYVNNHWVKCLSNYYMKFQGHSE | |
| | | KAVAIATTICRRKRQIYNQSQYVGSKEIVDLLNNAEEHEE | |
| | | LILQIRRDQSAKLVFNLIEGKLSSAVLLNTLNTEQHSYQD | |
| | | SQAIEKNLDLIDLKEESLQPSLPKKFNPDDIKAFAEEELW | |
| | TnsC | MVTNRRFPQEFLQAPTDNKLKYFKDIIVPHRNIKLVLDQL | 587 |
| | | LKNAIEPDDALVYLVFGVTGVGKSRLKAEFEKRLLKHFAD | |
| | | EIISNPGSLVVGGIEVDGAEAGKFNYSNYYIQVLESLKEV | |
| | | LIDYKENYGVDLEDDNSDNLIGDHEGRNSKALRRTIQKVF | |
| | | LHRQLKAYTLDEAQHLFDVAGGRQINVQMNWLKSLANKTQ | |
| | | TVHILFGTYELLKCQEVNGQVGRRSEDYYLPPYYLTKPED | |
| | | QQEFIKVIKTLQQYLPVENEPQLEEHWEYFMKYSIGCVGI | |
| | | LKSWWYRALKNALDEGAKTVRMKDFKARELSAGRRRTIQE | |
| | | ELKAGESRLANLYTNEQKDENPEFTNSQPEKKGSKVGERK | |
| | | VGRDLVGVNQEG | |
| | TniQ | MSIYEEIWSPKSLEIPQRSRLFCLEPVAVGTPYTESLSSY | 588 |
| | | LHRLAQAHCLTSQKLVMGEIAPLILKDEDKSELLVKNLSH | |
| | | LLGNSDAKPAINGMREMTGKLVTVLEELTMRRDLRFLTLL | |
| | | SWKGMIYDKGLFRNYRAWCPCCWQEWMQENKTIYEPLLWS | |
| | | FKNVEFCLIHKQRLVEECPRCGSRLPMIAKFSPAGFCSRC | |
| | | YGWLGQEIKGEAEIEKYRVNIQGISELIALTPQLGYKPIP | |
| | | IELTRKLQLILLVFEQAIGKDVKLLGDLGGVMESLRIAST | |
| | | RNQSQPYHLVKLIIPVCEKAKISVSQLFGSDFQELGKTLF | |
| | | GNFSLELKL | |
| | TnsD | MDIDIIQIQPYFEDELWSPEKFPMLERSRLHHLEPIGIGT | 589 |
| | | PMVESLTSYVTRLAHSHGVFVNILLSRIVNPLLQQTFIKN | |
| | | STSRGLKPFFNRSHALNGYGIMATDFVDVLNKLTLHNQLE | |
| | | LLTLIPFSNILVTKGLLRSHKAWCPICYQHWKQKKQLIYD | |
| | | PLLWSFNDVKICLIHQHTLVQNCPHCHSQLLWLNWKSTLG | |
| | | YCSQCFQWLGGYSKTSVVDRERWIVENLGEFLTNANQLSS | |
| | | VLTQELIPKSFTHVVHKVSGDNIAAFAAMHKIPKNTFWGW | |
| | | YSGKTCPSLFALLQICYNLKISLFQFFTQDFNLSTNHCQN | |
| | | LKLDMKYSNKIRSSPKILDLDHIENTLTSILSQAKDPLPT | |
| | | IAEIAKQLKINRRVISRHFPLLSHQIVVKRRNYMGMCHLA | |
| | | AIEQCCQEIVEAIVSLHQSGEYPTESRVCELISNPGYFRY | |
| | | KKVRLFYKKTVQSILSRL | |
| | Cas6 | VIATAINSEYYLDLTFKLRGAPIPLDNGYAVYSALSRICP | 590 |
| | | SLHELKSIGIHPITGIPTRNNLLELTAQSRLKIRINHQQI | |
| | | PLIYPYLAGQAFHIGQNSYQLDIPDYKPLISSESVYSRLV | |
| | | IIKGFQDSNNFIEAVQRQLDNIGIQGKIELLTRQDGTPQK | |
| | | RQLTINKEEKKFEIRGFGVKISELNPEDSLTLQEQGIGGK | |
| | | RKMMCGIFVPATRSKEEEET | |
| | Cas8 | MVATQPKISLSLGAADTTIIHRVGMTGLYMTLKQLEKQYP | 591 |
| | | SSRQRGGHISWSLTADTIELFWQGSDFVAISWLINESFQL | |
| | | DDTGLIHLAGLDNNAIDLTQKIQIHEGMCAVFLRLNKFYQ | |
| | | AGKLVNTELTFEEKKVEYQYKSLTWYAHQTFAEKLCDTDT | |
| | | QQLRQDYVQITSWLYLGGIVRHARTQNTTKLEEKPEYALA | |
| | | LLFVPVVCHYCLLHIPSEDLKEKKTHRYLVVIPEIKDFED | |
| | | ASQRRWRLQQLETKQLHVSSLGEAGLLYYSLDDIQPQGDY | |
| | | YQACQVWLYEKMNKDSRQRTLMSIEEIKIDKNTLITYQQI | |
| | | QKYFPTNYQKIQPKQIFIKVNPIRSLIADNLVKGIHWWSN | |
| | | FWEKLVIDDSQGYLFNQLFFNREGFIIMAENSEEDKQYLI | |
| | | FIKVFQQAMKGNFAKMYAKAQEGKDPPIKKKVERLRAELN | |
| | | YCYDELSFKEYLSDFLVRGGLNKYFNQHQEEIVLLIKKIP | |
| | | WQELRIWSLLAIASYKPKNKLTKMNDDSEEE | |
| | Cas7 | MMTQKKNDNNIPNYYLYGTVLTRYGLASLNHDMRRGNKTT | 592 |
| | | LQKGYWNGKIHSFVGSSAIRWALRFYLQQQGYLVNRVWDE | |
| | | DEHINRLTSEDFDPEEFYDDDIFGFALLESAETEEEISTT | |
| | | KRKKKQTKASTLNQRTGALGMNMAVSLTPYDGAVKLGAKS | |
| | | GRDKDSTSLHFTEYHATRYQYYFGIDATHLRDFSRILPLI | |
| | | DGIMNLPKVGGSSNIFNYPFCPDSFVFQWTNNLPSYISYC | |
| | | FEYCEPKSKEARFTQEFIDEVECGQIDPSTLWIGGTIVKE | |
| | | LHQLDNFDNSPFKQAHIYRNRNELAEALKAVIKRDLVLEE | |
| | | SK | |
| | Cas5 | MTAPLILYVDVPFATFRESHAREMGKTYPVPPPATVYGML | 593 |
| | | LSLVGETDVYRHCGVELAIAMLSSPKKSRILRQMRRFKNA | |
| | | DFSNPENVIPCYQEVLSNLKCLIWIRSDGEKIKPSLRERI | |
| | | QLAFDHPELVRRFGCLFLGESDQLIKTIKLVSQDYLEGVR | |
| | | QWAIKDNRGRLTLPYWVDHVGSRNTRFLRYRIEEMPSSPP | |
| | | PDLAWTMIQSPI | |
| | end1 | CTGGGTAGGTGTAGTTATTTGTGCCGACAATATTGATCCG | 594 |
| | | GAGGTCGGAATTACCAGTTTCGCAGGGGCTATTTTCTAGA | |
| | | TGATTGGAGAATAGTGTGGTGATGCGGACAGCAATGCGGC | |
| | | TATGATTTACGCTGCCACCTGTCATGGCATAAACTTGACC | |
| | | GTTGATCAGTTCGTGTTTTTCTAGTTGCTGTTCTTCCCAA | |
| | | GTGAAATATTCTTCGGGGGTTAGGGTGGGGAAGTTTTCTT | |
| | | TGGTTGCGATCATGGTGGGGAAACTCCTGGGTTGGATGAC | |
| | | TCGCACACTTTTATATAGAAAAATCTCTGCTGCACTTTGA | |
| | | TTTTACACAAATAGATTGATCCGTAATGCCCTACTTTTCA | |
| | | TTTAATATTGCTTGTTCATCAAGGAAAGCTTGTAATACCA | |
| | | ATTCACAATTCGCAATGGACTTCGTCCCGCTTCGCTAACG | |
| | | CAATTCGCAATTGATAAATCCTGACTTGACAAGGTTTTCT | |
| | | GGGTTTCGATCTGTATCAGAATTTTAGTGAATTGGTATTA | |
| | | CTGCTTGTCGCAGACATCGCCGATGACCCAGGTTAAAATC | |
| | | CCTTCTCGGAAGTAATTTACTGCTGTACACAACCAAATTT | |
| | | TGTGTTTCTAGTTCATCTAATTTTCCAACTTCTGGTATGT | |
| | | CTTTGCTAAAAAAGAGACGCTGCAATCCAGCGTCTCTTCT | |
| | | CACGATTTATTGATCAATCTGAACCTGATTTAAT | |
| | end2 | ACGAATGGAAATGGTTGATAATTCACATTGATTTTTTCAA | 595 |
| | | AATTTTTCAGGCATGATTTTGCCGTTACTGTTTTCAAGCA | |
| | | TAGCTTTGCCGTTGCGGCAAAATCAAACTTTAAATCACAC | |
| | | GATGATAAATAATCAATCACTGAAAAAATAT | |
| | CRISPR | TTGAGCAACGCCTAACGGCAATAAGCCACGAATCATCCAG | 596 |
| | array | TATTGCGGGAGGGTGATTCTTATCCCCAAAATTTGAGCAA | |
| | | CGCCTAACGGCAATAAGCCACGAATCAT | |
| GCA_900010 | TnsAB | MLSDTEFQAWCDRLQLSQQQRDWVNQIRTSPPVRKVKGSS | 597 |
| 725.1_BBR | | RNVHGPYASKKMGRTIQFESHTVELPAIIQFYENDDSVLE | |
| PRJEB10992 | | YWDQPIKLTIKCSPQGKQATTIAHYPDFFVMKKNRCGFEE | |
| genomic\|LN | | WKTEKKLDTLSKEQAYRYQNLEGKWVDIIVQEYIKSLGYY | |
| 886408.1\|225 | | YSLRSDSEIDWVKYRNQKYLQPYKQGYLDQQYILDEQVEF | |
| 910\| | | HIKEIIINNPGINLTNLIKKAQNASIDDINTLMALEKVYV | |
| Planktothrix | | DLSAVALIEQDRVHLFRDQATAEAYITATHDYSEPVSSSV | |
| | | QIVDLKVGSSFLLDGKSVTIDHIGESKIILKGEQGIIRWT | |
| | | HAEFQQLVELGEISYLQTKEQTTLDEEGWQQYFIEASPKA | |
| | | LEIANQRYQAIKPLLDGESYDSLDCNRPERTLREWKAKYR | |
| | | KAKQEHGVGLVGLIPQYKGNPTPRYSDEDLEFIDKVIEEH | |
| | | YETFKQKNAWQTYLILRDKWEESGLTSPIPSHTFYYERLK | |
| | | KRNSYKQTKRRMGSRAANSLLGPWLIKPTTPRHGDRPLEI | |
| | | VHIDHTQLDVQCVCPYSKKNLGRPWVTGMIDAYSRRILAL | |
| | | YLTFDHPSYRSCMMAIRICVQRFGRFPEWIVVDNGKEFQS | |
| | | TYFETLLARFEASKKHRPKDVPKFSSIIERWFGSQNTEFI | |
| | | NNLRGNTQIMKHVRLVKKENNPKNLAVWNLEELYDYLAFG | |
| | | YAYGVYDRSEHPALEGMSPQQAFESRLAKTGHRPHQYIKY | |
| | | DEQFKILTLPTNNKGTAKVIPGKGVRINYQDYWSDEFYSV | |
| | | ENQSVPVRYDPLDYGIAYAYVNNHWVKCLSNYYMKFQGYS | |
| | | EKAVEIASTVCKRKQQRYNQSQYVGAKEIVDLLNNAEEHE | |
| | | EIMLQIRRDQSAKLVYNLIEGTLSSAVLNSGDIKQPSAPK | |
| | | TKEIEETILDREEEILQPSLSREINLDNIKPFADGDLW | |
| | TnsC | MVIANNRPFPLEILHESTDNKLKYFKDVIVPHRNIRLILE | 598 |
| | | QLLKNAIEPDDALVYLVFGVTGVGKSRLKAEFEKRLLKHF | |
| | | QDEIISNPGSLIVGGIEVDSAEGGKFNYSDYYIQVLESLK | |
| | | EVLIDYKENYGIDLENDNEDNLKGDHEGKNAKALRRTMQK | |
| | | VFLHRQLKAYTLDEAQHLFDVAGGRQINVQMNWLKSIANK | |
| | | TQTVHILFGTYELLKCQQVNGQVGRRSEDYYLPPYYLNKV | |
| | | EDQQEFIKVIKTLQQYLPVENAPQLEENWEYFMEYSIGCV | |
| | | GILKSWWYRALKNALDDQAKTVRMKDFKARELSAGRRKKI | |
| | | KEELEAGERLLASLYNDGNLKKIESTASSSPKKGRRVGER | |
| | | KVGRDLVGINQEG | |
| | TniQ | MSIYSELWSPKPLEIPQRSRLFCLEPIAVGTPYAESLSSY | 599 |
| | | INRLAQAHCLTSQKLVMGEIAPLILKDEDQSELLSKNLSH | |
| | | LLGNSDAKPAINGMREMTEKLVTVLEELTRRQDLRFLTLL | |
| | | SWKGMIHDQGLFRNYRAWCPCCWEVWKQEKKTVYEPLLWS | |
| | | FKDVEVCLIHKQRLVEVCPHCGSSLPVMARTSPAGFCSRC | |
| | | YGWLGQEIKGEEEIEKYRVNIQGISELIVLTPQLEYQPIP | |
| | | IELTRKLQLISLVFEQAIEKDLKFLGELGGIIESLKIASI | |
| | | QNQNQPYHLVKLIIPVCEKAKISISQLFLLNFKNFVEILF | |
| | | KNFAIELKL | |
| | TnsD | MVMDINVAEIQPYTNDELWSPEKFPMPPRSSLHHLEPIGV | 600 |
| | | GTPMVESLTSYMTRLAHSHGVFVSTLLSRVVNPLLQRTFI | |
| | | KNYTSRGLEPFFNRSHTLNGYGTIATDFIEVLNQLTLSNN | |
| | | LKFLTLSPFSNILVTKGLLRPYKAWCPICYKRWKQNQEVI | |
| | | YEPLLWSLNDVKVCLIHQHPLVQNCPHCHRQLLWLNWKSS | |
| | | LGYCSQCSQWLGGSSNTSIVTQQRWIADTLGELVANADRL | |
| | | SSVLTQERIQQSLTYIVHQVSEDNIAAFAAIHKIPKNTFW | |
| | | GWYSGKNRPPLSALTQICYNLKISLFQFLTQDFNLSAIPD | |
| | | RDQKVEMEYCKNTRSSARTLDFNHIENTLSLILSQAGESL | |
| | | PTIAEIAEQLQINRRLLSRHFPDLCHQIVTKRRNYVRMSH | |
| | | LTAIEHCCQEIKEAIALLHQSGEYPTESRVCELISNPGYF | |
| | | RYQKVRLLYKKEVQSMFSRL | |
| | Cas6 | MTAVSINSEEYLDLSFKLKGAPIPLDNGYPIYAAVSRICP | 601 |
| | | SLHKLDSIGIHPIAGIPTSNNFLELTAQSRLKIRIHHQQI | |
| | | PLIYPYLTGQTFQLGQHSYQLDIPDYKPLTSSESLYSRLV | |
| | | VITGYQDPTTFIQAVQRKLDNLGIRGKIELLTRQDGTPQR | |
| | | RQLTINKQGKQFKVRGFGVKISELSPEDSLTLQEQGIGGK | |
| | | RKMMCGIFVPATRSKEEEEG | |
| | Cas8 | MIVATQPKISLSLHASDTTIMHRAGITGLYMTLKRLEAQY | 602 |
| | | PSSHQRGAHISWSLTADTIELFWEGTDFVALSWLFKESFQ | |
| | | LDDTGLIHLAGLDNDAADLSQKIQIHEGMCAVFLRLNKFY | |
| | | KAGKQVKTELTVEGKKVEYQYKSLTWYAHQTFADKLCETD | |
| | | TQQLKQDYVQITSWLYLGGIVRHARAQNMTKLEEKPEYAL | |
| | | ALLFVPVICQYWLLHLPSEDLKERKPHRYLVVIPEIKDFE | |
| | | DASQRRWRLQQLETKQLHVSSIGEAGLLYYSLDNIQPEGD | |
| | | YYQACQVWLYEKMNQSSHQRTLMSIEEIEINQNTLITYQR | |
| | | VQQSFQPNYEKIQPQKIFVKVNPIRSLIAENLVKGIPWWS | |
| | | DLWEKLVIEDTKGYLFNQLLYNRGGVIMMAENSEEDEQYL | |
| | | TFVKVFQQAMKGNFAKMYAKAEEGKEPPIKKKVERLRAEL | |
| | | NSCYDKLSFQQYLSDFLVRGGLNKYFNENKESILLLIKKS | |
| | | HWEELRIWSLLAIASYKPKEKPNDTENSSSTNNQDLKEVS | |
| | | DESE | |
| | Cas7 | MNQNNNDDRMPNYYLYGTVLTRYGLASLNHGMRQGNKTIL | 603 |
| | | QKGYWNGKIHSFVSSSSIRWALRFYLQKQGYLVNRVWDEN | |
| | | EHINRLTSEDFDPEQFYDDDIFGFALLESTETEEGTVTTK | |
| | | TRKKKAKLSSPNQRMGALGMNMAVSLTPYDGTLKLGAKSG | |
| | | REKDSTSLH | |
| | Cas7 | VECGQIDPDELWIGGPIVAELQQLADFDNSPFKKVHLHRN | 604 |
| | | RNELIDALKTVIKRDLRLEEPK | |
| | Cas5 | MITPLILYLDVPFVTFRESHAREMGKTYPVPPPATVYGML | 605 |
| | | LSLVGETDVYRHCGVELAIAMLSNPRKSRILRQMRRFKNL | |
| | | NFSEPENVNPAYQEILSNLKCLIWVRSEGEKIQPSLRERL | |
| | | QLAFDRPELVQRFGCLFLGESDQLIKTIKLVSEDYLEGMR | |
| | | QWVIKDNQCRLTLPYWVDHVGSRNTRFLRYKIEERSSLSP | |
| | | PDLAWTMIRSPI | |
| | end2 | S | X |
| | CRISPR | ATCTGAGCAACGCCTAACGGCATAAAGCCACGAATCACAT | 606 |
| | array | TAATCGGTTACGGAGATCGGGTTCAGCTTCGATCTGAGCA | |
| | | ACGCCTAACGGCATAAAGCCACGAATCACA | |
| GCA_002367 | TnsA | MLHDVEFQAWCNSLRLSQQQRDLVNQIRTSPPARKVKGGG | 607 |
| 975.1_ASM2 | | RNVHGPYASSKMGRTIQFESHTVELPAITQFYEYDDQVLE | |
| 36797v1_gen | | YWDQPIKFSIKCSPQGKQATTISHYPDFFVMRKNCCGFEE | |
| omic\|AP0181 | | WKTEKKLEKLSEEQPYRYQKIERQWVDVIVQEYVESLGYY | |
| 74.1\|6565356 | | YRLRSDSEIDWVKYRNQKYLQP | |
| \|Anabaenopsis_ | | | |
| circularis | TnsB | VLSTKRYRTIREISKPSTAQCNLEHYTLFLLSEPKHGGCS | 608 |
| NIES- | | RLAEILGNVSHDSVNRFLLRERYDPYDLFEMVKTIINLTG | |
| 21 DNA, | | GILSVDDTVIEKLYSNPKYAELIGYFWSGKYHKSIKGLNL | |
| nearly_ | | ITLYYSDIHGNSVPINYRIYDKKEGKTKNDYFQEMLIEVI | |
| complete_ | | DWGVKPRLVTGDSWYSGVENLKFLRNQKLGFLFGVEKNRT | |
| genome | | VSNEPGNYYQVSSLEIPDEGLVTHLREFGFIKLFRKVFKK | |
| | | EDSRHYILHLPDAEALQEITRSQFVTIHDTHWGIESFHRA | |
| | | IKQVCGICRFMVRDSHAIKTHIFCSLQAFVRLELMRSENI | |
| | | ISNWYELQRNLFTLVVRDYIVDNLSNTCAA | |
| | TnsAB | MCCLAHINDIFCQCVSPKPYKQGYLKQQYILNEQVEANVQ | 609 |
| | | EIIVNYPGINLTNLLEKAKNATIDDINTLIALEKVYVNLS | |
| | | EVALVEQEKVHLFRDKATAEAYITATHDYCEPVSSNVSIV | |
| | | ELKVGSSFLLDGKSLTIDHIGESKIILRGEQGIIRWTYAE | |
| | | FQQLIELGEIINLQTENHTTLDEEGWQYFLEASPKALETA | |
| | | NYRYAAIKPFLGKELDNSQKCDLSERTLRDWKAKYRKAQQ | |
| | | KYGCGFIGLIPQYKGNPTPRYSDEDLEFIDEVIEEQYETF | |
| | | KQKNVWQTYELLRDKWQKSGRISPLPSHTFYYERVKKRNS | |
| | | YQQTKKRTGSRAANNLLGPWLIRPTTPRHGDRPLEIVHID | |
| | | HTQLDIECICPYSGQNLGRPWVTGMIDAYSRRILALYLTF | |
| | | DNPSYRSCMMAIRICVQRFGRFPEWIVVDNGKEFSSTYFE | |
| | | TLLARFEASKKHRPKDCPKFSSIIERWFGSQNTEFINNLR | |
| | | GNTQIMKHVRLVKKANNPKNLAVWNLEELYDYLAFGYAYG | |
| | | VYDKAEHPALEGMSPHKAFELGLAKTGHRPHQYIKYDEQF | |
| | | KILTLPTNNKGTAKVIPGQGIRVNYQNYWTDEFYSVENQS | |
| | | IPVRYDPLDCGVTYAYVNNHWVKCLSNYYMKFQGHSEKAV | |
| | | AIATTICRRKRQIYNQSQYVGSKEIVDLLNNAEEHEELIL | |
| | | QIRRDQSAKLVFNLIEGTLSSAVLLNVSNTEQHSSHDSQK | |
| | | IEENLDLIDLKEEILQPSIPKKFNPDDIQAFAEEELW | |
| | TnsC | MVANRRFPQELLQATTDNKLKYFKDIIVPHRNIKLVLDQL | 610 |
| | | LKNAIEPDDALVYLVFGVTGVGKSRLKAEFEKRLLKHFAD | |
| | | EIISNPGSLVVGGIEVDGAEAGKFNYSNYYIQVLESLKEV | |
| | | LIDYKENYGVDLEDDNSDNLIGDHEGRNSKALRRTIQKVF | |
| | | LHRQLKAYTLDEAQHLFDVAGGRQINVQMNWLKSLANKTQ | |
| | | TVHILFGTYELLKCQEVNGQVGRRSEDYYLPPYYLTKPED | |
| | | QQEFIKVIKTLQQYLPVEVEPQLDEHWEYFMEYSIGCVGI | |
| | | LKSWWYRALKNALDERAKTVRMKDFKARELSAGRRKTIQK | |
| | | ELEAGESRLAFLYKNEEKIEKPESINSQSLKKGRKVGERK | |
| | | VGRDLVGVNQEG | |
| | TniQ | MSIDEEIWSPKPPEIPQRSRLFSLKPVAVGNPYAESLSSY | 611 |
| | | LHRLAQAHCLTTQKLVMGEIAPLILKDEDKSELLAKNLSH | |
| | | LLGNSDAKPAINGMREMTTKLVTVLEELTMRQDLRFLTLL | |
| | | SWKGMIYDKGLFRNYRAWCPCCWEEWMQENKNIYEPLLWS | |
| | | FKDVEFCLIHKQRLVEECPHCGSRLPVMARFSPAGFCSRC | |
| | | YRWLGQEIKGEEEIEKYQVNIQGISELIALTPQLGYKPIP | |
| | | IELTRKLQLILLVFEQAIGKDLKLLGDLGGIMESLRIAST | |
| | | TNQSQPYHLVKLIFPVCEKAKISVSQLFESDFQELGKILF | |
| | | GNFSLELKL | |
| | Cas6 | MNFLEIQFALRGKTLPADHGYALYSAVKKLLQESEDESLP | 612 |
| | | NDLPPEVRLCSIPGINDRCGMIYLNRGSRFRLRCPSEQMQ | |
| | | TWYRLLQNQVFEIRGHLIRLIQPRITLPEANEILVSRLVT | |
| | | FKLDAIDHADVPRYFLESCQKGLERLEIKGQAFIPSDING | |
| | | DLARRTIQVKDKKIVGYGVVVEGLSEKDSLKLQWYGLGGR | |
| | | QHFGCGWFYPSQEEPNVN | |
| | Cas3 | MSIKMQTLRPKLLLAKSMEVPWKGAYTLTGHTASVVEAVT | 613 |
| | | TLIDTLGNQLLFQFGLSCCDLAQLRATARLAAYIHDLGKA | |
| | | NDHFQAVVRKLKNPMEHPQLIRHEALSVLLAWELRDWLAT | |
| | | GDGNFLIAIAAAGGHHLKLGGESGKQTDELGEIRESGVDA | |
| | | WTRGDRILLYTNHQHFIGLLRYGQKACGLASHLPQDLPTS | |
| | | WTIADIKQQRKILLQEFAIWEADSILTAVVKALLVAADSS | |
| | | GSALPVNNVPIQPWIQTQIHYTLTEPELQRVVDERLNGDM | |
| | | LHPFQKDLGNTTSRVTLARAGCGTGKTLGAYNWAKHHAVG | |
| | | RKLFFCYPTTGTSTEGFLDYTHDKVDSTLLHTRAAVDLEH | |
| | | LDLHSTGDEDDLETKLESFKAWSTKVSVCTVDTVLGLLQC | |
| | | NRRPMYCFPAIAQAAFVFDEVHCYDNKLFGALLRFLEVVK | |
| | | APVLLMSASFLPWQIKAIETAVGEPINIIPGPKELETQPR | |
| | | YRFRLADAPDWERVKAEFEQGGKILWVCNQVNTAIAVYEE | |
| | | AKQYGLQPLLYHSRYKYGDRVNHHREVVDRFKAEGAVMAI | |
| | | ATQVAEMSLDLSATLLVSQIADPAGLIQRLGRLNRRYCGH | |
| | | ALDALFYPDEKVGFPYSQDELDAGAALIQSFSGEVCQADL | |
| | | ALWLEKAAVQGEPDQDSVWLDGEWRTYPASLREAGYTITV | |
| | | LLEQDLKTVEKLPAKLLPRYTVPLIVNSKQTKGWKKCRRY | |
| | | PLAPTEFWGYSSDIGAFQIKS | |
| | Cas8 | MTELVLSIFDPNTLLPHRAGIAGLALALSVIAPTDAPLQW | 614 |
| | | EVTEDAVKLYWDSKDQEAVQWLLEQTYQIKRGLLIAPSLN | |
| | | LDEQGCFTFNQGMLASFLQHGQQKSFVEDPNKPKQGKKKF | |
| | | YKTQTLNFMIEPDSPEISVSYTLLDSCYYTESSKLAKDFS | |
| | | SGKPEVKTQILPGLEECFVNGSYKESSGSFLALLFLPLAC | |
| | | GYYQLPNINSKSRSAIVIPEVQNLMEWVKLRKKLPSKTYA | |
| | | NFGSSYGKFRASSAGESALRFLLDERQLDDSNLFKVSYCE | |
| | | VYQLGSQPWNANQSYIKQAVYRVPLKDDAINLYRIAYQNL | |
| | | KPKLRPKQDGEGFWLPESRVLAWISDNLISDRAWYVGFFE | |
| | | FRKAATIYLEDRRGLVVMTEHLSPDERILFDAVQGAFKKY | |
| | | RGQQIEQAKRQGRKPDWEQITNKVIYRLQRPSTQQEFAKA | |
| | | LVEFLSQFRSKEALSSGPQIFWWLHQEANWRKARDLALLA | |
| | | VATYQGQSTEEKAEIEQDLTEEVTEETTEQTANVL | |
| | Cas7 | MSQHLFATIVTSTAVAANNRGEGDGSTLSTLQKITRGNDQ | 615 |
| | | YTTVSAEAIRWGLREYLQNLDSKKVNRTFDPDKDVYNLKN | |
| | | ERFSAKDFIDDDLFGYMDAKKGEKNEDATTKRRGALEVSR | |
| | | AISLDPFWGDIAFGSKGGAKGKTSIHSSEVHYTAYQYTIA | |
| | | LTPETLKDPIRAALVLDAIGAVRHVGGNHARFLYDFRPES | |
| | | IVIRVTPDPSPWIMDIFKRMDDAVGCPKLLRLVEVRDVAA | |
| | | SELIVAGEIADTPYGKQLEALEVKVCRGVKEAIAAAQELL | |
| | | KA | |
| | Cas5 | MTSLLYIECPCTSFPRSFARDYKETYRYPPPSTIYGFLLS | 616 |
| | | LVGEVDMMTHLGVKIAIGIIGDDPPISRIVRKQRHHKFSR | |
| | | AHLGTYPTSKFSKPNHQELLTDLRLVVHLDSSEEQSTIKL | |
| | | TERVAIALSTPEQITRFGGLSLGESWALVNGVRIYRETDG | |
| | | KIRWLVKDNRGLISLPVWIDRTTGQGTFFRFDFSDSFSEA | |
| | | SWIQIQMPQLNPKSVRSKPSRLSKKSG | |
| | CRISPR | TCTATTTACGCCTACTGGCATCACAGGTTTGGGCAGGGCA | 617 |
| | array | ACAATCAAGCAATTAACATGAATATGGCTGCTGAGTGCTC | |
| | | AACGCCTACTGGCATCACAGGTTTGGGCAGGACTAACATG | |
| | | GCTCATATCTTCAAGATAACTATTGCGTGCTCAACGCCTA | |
| | | CTGGCATCACAGGTTTGGGCAGATATTGAGGCCGGGAACA | |
| | | GAAATTGATTTATACGGGTGCTCAACGCCTACTGGCATCA | |
| | | CAGGTTTGGGCAGAGTGCAGTGCAGAAGCGATCGCACTCA | |
| | | GTATTCAAGTGCTCAACGCCTACTGGCATCACAGGTTTGG | |
| | | GCAGTTCCATGAACGTGTGCGAGAAGGATACCAATGGATT | |
| | | GTGCTCAACGCCTACTGGCATCACAGGTTTGGGCAGTAAT | |
| | | ATCCTTGACAGGCGTATGGTATAACGCCGAGTGCTCAACG | |
| | | CCTACTGGCATCACAGGTTTGGGCAGAAACAATCAGATTT | |
| | | AAGGATTTTGACTACTCCGGGCGGTGCTCAACGCCTACTG | |
| | | GCATCACAGGTTTGGGCAGTTTATACCCTTTCTTCCCCGT | |
| | | CTCTAGTCCCCAAGGTGCTCAACGCCTACTGGCATCACAG | |
| | | GTTTGGGCAGGTAAATTACATGAAGTTGCCTTTAATGTCT | |
| | | TCCAGTGCTCAACGCCTACTGGCATCACAGGTTTGGGCAG | |
| | | TCCAGATTCCCATAATTCCAGTTCTTCGTCAGTTGGTGCT | |
| | | CAACGCCTACTGGCATCACAGGTTTGGGCAGAAAAGTCTG | |
| | | CGGAATGGGTTAACCAAGCTAAAAAAGTGCTCAACGCCTA | |
| | | CTGGCATCACAGGTTTGGGCAGGATAGGGGAGGTATTGAG | |
| | | GAAACAGTTTGCTAAATAGTGCTCAACGCCTACTGGCATC | |
| | | ACAGGTTTGGGCAGCTAAATATTCCAATCTGTCTATGCAG | |
| | | CAACGAAATAGTGCTCAACGCCTACTGGCATCACAGGTTT | |
| | | GGGCAGGTCTGTTGCTTCGCTGTTATCAGCTAACCAATCA | |
| | | TGTGCTCAACGCCTACTGGCATCACAGGTTTGGGCAGTAA | |
| | | GTAGTCAACATATTTAGGAATATCACTTGGAAGTGCTCAA | |
| | | CGCCTACTGGCATCACAGGTTTGGGCAGGACATTCTCAGT | |
| | | GGATGATCATCAGGGAAAAGCTTATCAGTGCTCAACGCCT | |
| | | ACTGGCATCACAGGTTTGGGCAGTACATACAACTATTGCC | |
| | | TAAGCAGTTCGAGATACTAGGTGCTCAACGCCTACTGGCA | |
| | | TCACAGGTTTGGGCAGTCAACGCAAATAGTAGATGATTAC | |
| | | TCAATAATAAAGTGCTCAACGCCTACTGGCATCACAGGTT | |
| | | TGGGCAGTGTAAATATTGGCGCAACCACTCCCGGAACAGG | |
| | | CGGTGCTCAACGCCTACTGGCATCACAGGTTTGGGCAGAA | |
| | | AGTGTTTTCAAGAGAACGGGGAGACGGCCATTATGTGCTC | |
| | | AACGCCTACTGGCATCACAGGTTTGGGCAGAAAACTCTTC | |
| | | CTCGAAGATTCAAGCCATTAAAGGAATGTGCTCAACGCCT | |
| | | ACTGGCATCACAGGTTTGGGCAGCTCTTTTAATTCCCAAT | |
| | | CTGCTTCTTGTATTTCAGTGTGCTCAACGCCTACTGGCAT | |
| | | CACAGGTTTGGGCAGTTATATATAATGACTATGCAAAATA | |
| | | TAAATCTTCCTCTAGTGCTCAACGCCTACTGGCATCACAG | |
| | | GTTTGGGCAGCTCACAGGCTGTTTTGATCTCGTTGATAGA | |
| | | CTGGTTGTGCTCAACGCCTACTGGCATCACAGGTTTGGGC | |
| | | AGGCAGGGACGGAGCTTATTATCTTGTCTTGTCCTACTGT | |
| | | GTGCTCAACGCCTACTGGCATCACAGGTTTGGGCAGTTAG | |
| | | AGTCCGTAAGTACGGGCTTCAATTACAAAGTGTGCTCAAC | |
| | | GCCTACTGGCATCACAGGTTTGGGCAGGCAATGGTGGGGG | |
| | | CGGTGGCGGCGGATAATCTGGCTGTGCTCAACGCCTACTG | |
| | | GCATCACAGGTTTGGGCAGTTTATCCCCCGAAGATGAGGA | |
| | | ATGTACTGAGAACTCGTGCTCAACGCCTACTGGCATCACA | |
| | | GGTTTGGGCAGAAACCTGCCATTGCCGTAAACTAGTCCAC | |
| | | CATTACGTGCTCAACGCCTACTGGCATCACAGGTTTGGGC | |
| | | AGAAAGTCATCTTCCCGGACAACAGCAGGAGCAACTCTGT | |
| | | GCTCAACGCCTACTGGCATCACAGGTTTGGGCAGACGTTT | |
| | | GTTAGCCAGAACTCTGAAGTTCTTCGAGAAGGTGCTCAAC | |
| | | GCCTACTGGCATCACAGGTTTGGGCAGTCGATTTGTGGTT | |
| | | GCCGCACCGAACGACAGCAAACGGTGCTCAACGCCTACTG | |
| | | GCATCACAGGTTTGGGCAGATTTTGCTCTACTTGGGTTGA | |
| | | TAACACTGGTAAACCGCAACGTGCTCAACGCCTACTGGCA | |
| | | TCACAGGTTTGGGCAGTTCAAGGTTGTCGTTATTTGGAAC | |
| | | GAGCTTGTCATGTGCTCAACGCCTACTGGCATCACAGGTT | |
| | | TGGGCAGAAGACCAAATATAGATTCAATCTTTCCTCCGGA | |
| | | AGTGCTCAACGCCTACTGGCATCACAGGT | |
| | | TTGGGCAGCTAGGGAGTACCAAGGGGTTTATGATTGGTAA | |
| | | CAGGGTGCTCAACGCCTACTGGCATCACAGGTTTGGGCAG | |
| | | GATGTCGAAGCCCAGTTCGAGCGCGTCAAAAGCCGAGTGC | |
| | | TCAACGCCTACTGGCATCACAGGTTTGGGCAGCCCAAATG | |
| | | CCAGGGTGGAACCTCAACATTAGTTCCGTGCTCAACGCCT | |
| | | ACTGGCATCACAGGTTTGGGCAGGGTTAGTATTAACTGTT | |
| | | CTCCGTGCCATATATGTATGTGCTCAACGCCTACTGGCAT | |
| | | CACAGGTTTGGGCAGGGCAACTAGGACTAGGCGATCGCGT | |
| | | GTGGATTTATTGTGCTCAACGCCTACTGGCATCACAGGTT | |
| | | TGGGCAGACCAGTACCAGAATTCCCATTCTTCCGATTCAC | |
| | | CTAAGTGCTCAACGCCTACTGGCATCACAGGTTTGGGCAG | |
| GCA_011769 | TnsAB | MKEQFEQWVARLQISEAGQKIIEKVRSSEPSRRVGGGSKN | 618 |
| 525.1_ASMI | | VAGRYPSRKMGVTIQFESHRVELPVIYQLEHDEDVLEFYD | |
| 176952v1_ | | QPPQIKLDYQASNGRRLGVLHTPDLFVIRTNSAGWEECKT | |
| genomic\| | | EQDLKKLAQKNPNRYFYSQEDNQWHCPPGEVYADQFGLYY | |
| CP050 | | RIRSDKEINWVLQRNLQFLEDYYRSESLGVEQAIAQSLLA | |
| 440.1\| | | IVSSQPGITLAELLHQQTGAKSDDIYTLIVQEQIYFDLNA | |
| 847912 | | APLAEPERCLIFRDEQTASAYRLMVEQPNVSLPAISPVIN | |
| 3\|Tolypothrix | | IATGTPVSWDGKGLNIILVGETEVILGAENDQLIKFKKNV | |
| _sp._PCC_7910 | | FEELVRQGEITSLQTPEKTDISTESWQRFYQASPEDQAEA | |
| _chromosome,_ | | LERYKTIEPYLNGHPPENETIPARTIRDWKAKYLTALQKY | |
| complete_ | | GCGYIGLLSHRSVKGNRQRKLPEDTLAIMERFILEDYETL | |
| genome | | KQKRMLEVYGALVLACEQSSVIAPSYKAFTKEVKRRTGYE | |
| | | QTKKRQGRRAAYQYESFYWELTQKTPRHGDRPFEIGHIDH | |
| | | TQLDVELVCSRTGRNLGRPWATFLVDAYSRRLLAVYLTFD | |
| | | SPSYRSCLMVLRICVKRHGRLPQIVVVDNGTEFHSVYFET | |
| | | LLATFECTKKQRPPAKARFGSVCERLFGTSNTQFVHNLLG | |
| | | NTQITRNVRQVTKSVNPKNQAVWTLGLLYEYLCAWAYEVY | |
| | | DTDEHPALFQSPRDAFAAGMVTSGSRLHRMIPYDENFQIL | |
| | | TLPTTSEGKAKVQVGRGVKINSIYYWSNSFRDPQIENTSV | |
| | | PTRYDPFNIGIAYAFVRGQWVQCISQYYSQLQGRSEKELK | |
| | | LASAELRKRSSNYGRQSQVSAKNLAEFLASVEAQETLLEQ | |
| | | RSYDAEAREVFIVIEGGKAATSRNEQPKLIQVPFENTDTQ | |
| | | VAEDEAITPETLVVYEEFSL | |
| | TnsC | MTQTNGFPLELLTRPAPERLAYFENYTVGHPRLKEVSEIL | 619 |
| | | MRTIAEPAGASFIFVYGPSGVGKTTLRLRVEQKLTELVLP | |
| | | LLESDRGRVPVVGVEAVAPESRNFNWKDYYTRALIALEEP | |
| | | LIDHKFDYGVRGISRDNFGKINVESKVVAPALRRALENAL | |
| | | IHRHPDVFFVDEAQHFGKMASGYKLQDQLDCLKSLANMTG | |
| | | ILHCLLGTYELLTFRNLSGQLSRRSVDIHFRRYCAENPED | |
| | | VQAFKSVLLTFQQQMPLAEAPDLVSHWEYFYERTLGCVGI | |
| | | LKNWLTRALKDALDREATTVTLKDLQKRAWSVAQCQRMFK | |
| | | EIQEGERQLSETETDIQNLRSALGLGAKPIVLPEETPKTT | |
| | | RPPGKVGKRKPKRDPIGVQQDVS | |
| | TniQ | MLANGLVTYESWDLKQLSIPSRSLLYQLQPVGIRTPMVES | 620 |
| | | LTGYIERLAEAHCIPPDVLISRIITPLLKQIFLKSRTSRD | |
| | | LRSLFDRATAINGTGNIARDLVQALQKLTLIEDLHLLTLL | |
| | | FWCEIIPTRNLFRTQSAWCAVCYEEWSLNNQVIYKPLLWT | |
| | | INSVKVCALHKICLCLQCPHCQQELPLLSWRSRPGYCSKC | |
| | | GGWLGMNLPVKSASELMACSTLSKEELHSQTWIVEVIGEL | |
| | | ISSTLSFKSPPVKEEIAKSLSLLIDAVIDGNIAEFARLMG | |
| | | IPKNTLWMWQTGKALPVLDILLKICYRLEISLLDLLKPEQ | |
| | | LAVKSFTKISHKTFRRSPTLRASPKLFDANQVQDALLAIL | |
| | | ASDKEPPLTMEEVATGLGYDRRTIFRHFPDLCRAISAKYR | |
| | | SYSKACHTEKIQQSCREVKQIVLKLHHQGEYPSEARVSEI | |
| | | MTNPGYLRYKQVRAALNETRRKIGF | |
| | TnsD | MVNPRGMTIYLEHWNLKPLEIPQRSRLFSLEPVAVGTPYA | 621 |
| | | ESLSSYLHRLAQAHCLTSQKLVMGEIAPLILKDEDKSELL | |
| | | SKNLSHLLGNSDAKPTINGMREMTGKLVTILEELTMRQDL | |
| | | RFLTLLSWKGMIYDKGLFRNYRAWCPCCWEEWMRENKTIY | |
| | | EPLLWSFKDVEFCVIHKQRLIEECPHCGSRLPIMAKFSPA | |
| | | GFCSRCYGWLGQEVKGEEEIEKYRVNIQGISELIALTPQL | |
| | | GYEPIPIELTRKLQLILLVFEQAIGKDLNLLGDLGRIMES | |
| | | LRIASKTNQNQPYHLVKLIIPVCEKAKISVSQLFGLDFQE | |
| | | LGKILFGNFSLELKL | |
| | Cas6 | MAALLIQSEEYVDLTFKLRGAPIPLDNGYVIYSALSRICP | 622 |
| | | ILHELDNIGIHPIAGIPTRNNLLELTAQSRLKVRIHHQQI | |
| | | PLIYPYLAGQTFHIGQNSYQLDIPDYKPLISSESVYSRLV | |
| | | IITGFQEPTNFIEAVQRKLDNKGIQGKIELLTRQDGTPQK | |
| | | RQLTINKQGKQFKVRGFGVRISELNPEDSLTLQEQGISGK | |
| | | RKMMCGIFVPATRSKEEEET | |
| | Cas8 | MVATQPKISLSLDAADTTIMHRVGMAGLYMTLKRLEKQYP | 623 |
| | | SSRQRGGHISWSLTADTIELFWQGSDFVALSWLIKESFQL | |
| | | DDTGLIHLTGLDNDAINLSQKIHIHEGICAVFLRLNKFYQ | |
| | | AGEIVNTELTVEEKKVEYQYKSLTWYAHQAFAEKLCEADT | |
| | | QQLRHDYVQITSWLYLGGIVRHARTQNTTKLEEKPEYALA | |
| | | LLFVPVVCHYCLLHIPSEDLKEKKPHRYLVVIPEIKDFED | |
| | | ASQRRWRLQQLETKQLHVSSLGEAGLLYYSLDDIQPEGDY | |
| | | YQACQVWLYEKMNQASRQRTLMSIEEIEIDKNTLITYQQV | |
| | | QKYFQPNYQKIEYKQIFIKVNPIRSLIADNLVTGIHWWSN | |
| | | FWEKLVIEDSKEYLFNQIFPNREGFIRMAENSEEDKHYLI | |
| | | FIKVFQQAMKGNFAKMYAKAEDGKDPPIKKKVERLRAELN | |
| | | YCYDELSFKEYLSDFLVRGGLNKYLNQNQAEILLLIKKLP | |
| | | WQELRIWALLAIASYKPKEKPISKDDSLTLNNQQLEEMND | |
| | | ESEEE | |
| | Cas7 | MMSQKKNDNNIPNYYLYGTVLTRYGLASLNHDMRRGNKTT | 624 |
| | | LQKGYWNGKIHSFVGSSAIRWALRFYLQKQGYLVNRVWDE | |
| | | DEHINRLTNEDFDPEQFYDDDIFGFALLESAEIEEETSTT | |
| | | KRKKKQTKTSTPHQRMGALAMNMAVSLTPYDGAVKLGAKS | |
| | | GREKDSTSLHFTEYHATRYQYYFGINATHLKDFSRILPVI | |
| | | DGIMNLPKVGGNSNIFNYPFCPDSLVLQWTNNFASYISYC | |
| | | FEYCDPQSKEAKFTQEFIDEVECGQIEPSQLWIGGTIVKD | |
| | | LQQLDNFDDSPFKKAHIYRNRNELIENLKTVITRNLGLEE | |
| | | SK | |
| | Cas5 | MTAPLILYLDVPFATFRESHAREMGKTYPVPPPATVYGML | 625 |
| | | LSLVGETDVYRHCGVELAIAMLSIPKKSRILRQMRRFKNA | |
| | | DFSHPENVIPCYQEILSNLKCLIWVRSEGEKIQPSLRERI | |
| | | QLALDHPELVRRFGCLFLGESDQLIKSIKLVSQDYLQGVR | |
| | | QWVIRDNRGWLTLPYWVDHVGSRNTRFLRYRIEEIPSSPP | |
| | | PDLAWTMIQSPI | |
| | end1 | UGGUUCGAAUCCAGUUACGUCCAUUGCUAUUGGUAGAGUG | 626 |
| | | ACUAAAAUUAUUUAUGUGACUUUACCCAUAACUUUGCCGC | |
| | | AACGGCAAGCUUAUGGUUCCAAUAGAGGGCGGCAAAGUUA | |
| | | UGCUUCCAAUUUUCCAUAUGUAGAGAAAGAAGCUAACUAA | |
| | | GUCUACCCUUUUUAAGUUUAUAGCUUUAGAAUCCAAUUUU | |
| | | ACGUCGUGU | |
| | end2 | UUGUUCGCAAUGUUCUCAAUGGUUAAGAGGAUAUUAUACU | 627 |
| | | ACUUCAGUAGUUACUCAGAACAGCUCGAUAGCCGAAAGUC | |
| | | UCUACCCUAUACCAGCAUGAACCGCUUUUGCUCCAUUCUC | |
| | | AAAAAAUCCCGCGCUUUCCUGCUUUCUAUGCUUGCUUGGA | |
| | | CUCACGGCAAGCUUAUCCUUCCAAUUUGGACUGGCGGCAA | |
| | | AUUUAUGGUUCCAAACUGUUAAUUACAUCCAAAAUUAGCU | |
| | | GACGCAAGAAUGAGAGUUUUAGUGUUGUUGACGGCAAAGU | |
| | | UAUGGUUCCAGUAGCGGCAAGCUUAUGGGUGAAGUCGCAA | |
| | | UUUAUCAAGGUUUAGCUUGUGUUUUAAAUCUUCCAUCUGU | |
| | | UGUUUGAUAUAAUCUGGCACUGGUGCAACUUCAUCCUGUG | |
| | | GUUGUUGCGUUUUAGGCGCGCUAGAUACUUGUGGUAACGA | |
| | | UUUAGCAUCUUUCUCAGCACACUGGCAAUAAACAGUUAUG | |
| | | AAAUACUUUUCUAACUGGUUAAGUCGGUACUCUUCUGCUU | |
| | | UCUUAGUCUACAGAAGUACAAAUUUAUUUAUCUCCAUCUG | |
| | | CCUACAUCUUCUUGUAUCGGCGUUUGAUUUAUUCUUUCCA | |
| | | UACCUCGCCAACAAGGGAAUCACUAGAUCCCUUAAUAAAU | |
| | | AUCAAAUAGAUAAAAAUAUAACAAAUUUUAUUCUAUCGUU | |
| | | UGGGUAUUUUUCCAAUCAUAUCUUAUUGUUUAAAUUGCAA | |
| | | GCAUUUGCGAAUAAG | |
| | CRISPR | GUGAUUCGUGGCUUGAUGCCGUUAGGCGUUGCUCAACAGA | 628 |
| | array | UUUAUGGUUGAAUGUUGAACCCAUUAGCCAGCAGGUGAUU | |
| | | CGUGGCUUGAUGCCGUUAGGCGUUGCUCAAUCUGAACAGG | |
| | | ACUUAGUGGGAUUUGUUGAUUUCUUGGUGAUUCGUGGCUU | |
| | | GAUGCCGUUAGGCGUUGCUCAAGAUUUAGUUGAUUUGGUA | |
| | | GAGACUUUUUGUGAUUGGGUGAUUCGUGGCUUGAUGCCGU | |
| | | UAGGCGUUGCUCAAAAUUGUAUAAUUUGGGGACAAAGGUC | |
| | | AAAACCAAGUGAUUCGUGGCUUGAUGCCGUUAGGCGUUGC | |
| | | UCAA | |

[1022] Various modifications and variations of the described methods, pharmaceutical compositions, and kits of the invention will be apparent to those skilled in the art without departing from the scope and spirit of the invention. Although the invention has been described in connection with specific embodiments, it will be understood that it is capable of further modifications and that the invention as claimed should not be unduly limited to such specific embodiments. Indeed, various modifications of the described modes for carrying out the invention that are obvious to those skilled in the art are intended to be within the scope of the invention. This application is intended to cover any variations, uses, or adaptations of the invention following, in general, the principles of the invention and including such departures from the present disclosure come within known customary practice within the art to which the invention pertains and may be applied to the essential features herein before set forth.

The application's sequence listing, which the Patent Office published only in electronic form, follows.

SEQUENCE LISTING (870 sequences)

SEQ ID NO: 1 - protein, 288 aa, Artificial Sequence
  Synthetic N-terminal capping region
MDPIRSRTPSPARELLSGPQPDGVQPTADRGVSPPAGGPLDGLPARRTMSRTRLPSPPAPSPAFSADSFSDLLRQFDPSLFNTSLFDSLPPFGAHHTEAATGEWDEVQSGLRAADAPPPTMRVAVTAARPPRAKPAPRRRAAQPSDASPAAQVDLRTLGYSQQQQEKIKPKVRSTVAQHHEALVGHGFTHAHIVALSQHPAALGTVAVKYQDMIAALPEATHEAIVGVGKQWSGARALEALLTVAGELRGPPLQLDTGQLLKIAKRGGVTAVEAVHAWRNALTGAPLN

SEQ ID NO: 2 - protein, 183 aa, Artificial Sequence
  Synthetic C-terminal capping region
RPALESIVAQLSRPDPALAALTNDHLVALACLGGRPALDAVKKGLPHAPALIKRTNRRIPERTSHRVADHAQVVRVLGFFQCHSHPAQAFDDAMTQFGMSRHGLLQLFRRVGVTELEARSGTLPPASQRWDRILQASGMKRAKPSPTSTQTPDQASLHAFADSLERDLDAPSPMHEGDQTRAS

SEQ ID NO: 3 - protein, 4 aa, Artificial Sequence
  Synthetic
GGGS

SEQ ID NO: 4 - protein, 5 aa, Artificial Sequence
  Synthetic
GGGGS

SEQ ID NO: 5 - protein, 9 aa, Artificial Sequence
  Synthetic
GGSGGSGGS

SEQ ID NO: 6 - protein, 15 aa, Artificial Sequence
  Synthetic
GGGGSGGGGSGGGGS

SEQ ID NO: 7 - protein, 10 aa, Artificial Sequence
  Synthetic
GGGGSGGGGS

SEQ ID NO: 8 - protein, 20 aa, Artificial Sequence
  Synthetic
GGGGSGGGGSGGGGSGGGGS

SEQ ID NO: 9 - protein, 25 aa, Artificial Sequence
  Synthetic
GGGGSGGGGSGGGGSGGGGSGGGGS

SEQ ID NO: 10 - protein, 30 aa, Artificial Sequence
  Synthetic
GGGGSGGGGSGGGGSGGGGSGGGGSGGGGS

SEQ ID NO: 11 - protein, 35 aa, Artificial Sequence
  Synthetic
GGGGSGGGGSGGGGSGGGGSGGGGSGGGGSGGGGS

SEQ ID NO: 12 - protein, 40 aa, Artificial Sequence
  Synthetic
GGGGSGGGGSGGGGSGGGGSGGGGSGGGGSGGGGSGGGGS

SEQ ID NO: 13 - protein, 45 aa, Artificial Sequence
  Synthetic
GGGGSGGGGSGGGGSGGGGSGGGGSGGGGSGGGGSGGGGSGGGGS

SEQ ID NO: 14 - protein, 50 aa, Artificial Sequence
  Synthetic
GGGGSGGGGSGGGGSGGGGSGGGGSGGGGSGGGGSGGGGSGGGGSGGGGS

SEQ ID NO: 15 - protein, 55 aa, Artificial Sequence
  Synthetic
GGGGSGGGGSGGGGSGGGGSGGGGSGGGGSGGGGSGGGGSGGGGSGGGGSGGGGS

SEQ ID NO: 16 - protein, 60 aa, Artificial Sequence
  Synthetic
GGGGSGGGGSGGGGSGGGGSGGGGSGGGGSGGGGSGGGGSGGGGSGGGGSGGGGSGGGGS

SEQ ID NO: 17 - protein, 32 aa, Artificial Sequence
  Synthetic
LEPGEKPYKCPECGKSFSQSGALTRHQRTHTR

SEQ ID NO: 18 - protein, 20 aa, Artificial Sequence
  Synthetic
PKKKRKVEASSPKKRKVEAS

SEQ ID NO: 19 - DNA, 9 bp, Artificial Sequence
  Synthetic
ggtggtagt

SEQ ID NO: 20 - DNA, 27 bp, Artificial Sequence
  Synthetic
ggtggtagtggagggagcggcggttca

SEQ ID NO: 21 - protein, 21 aa, Artificial Sequence
  Synthetic
GGSGGSGGSGGSGGSGGSGGS

SEQ ID NO: 22 - DNA, 72 bp, Artificial Sequence
  Synthetic
ggtggaggaggctctggtggaggcggtagcggaggcggagggtcgggtggtagtggagggagcggcggttca

SEQ ID NO: 23 - DNA, 48 bp, Artificial Sequence
  Synthetic
tcgggatctgagacgcctgggacctcggaatcggctacgcccgaaagt

SEQ ID NO: 24 - DNA, 192 bp, Artificial Sequence
  Synthetic
gtggataacaaatttaacaaagaaatgtgggcggcgtgggaagaaattcgtaacctgccgaacctgaacggctggcagatgaccgcgtttattgcgagcctggtggatgatccgagccagagcgcgaacctgctggcggaagcgaaaaaactgaacgatgcgcaggcgccgaaaaccggcggtggttctggt

SEQ ID NO: 25 - DNA, 108 bp, Artificial Sequence
  Synthetic
ggtggttctgccggtggctccggttctggctccagcggtggcagctctggtgcgtccggcacgggtactgcgggtggcactggcagcggttccggtactggctctggc

SEQ ID NO: 26 - protein, 7 aa, Simian virus 40
PKKKRKV

SEQ ID NO: 27 - protein, 15 aa, Artificial Sequence
  Synthetic nucleoplasmin bipartite NLS
KRPAATKKAGQAKKK

SEQ ID NO: 28 - protein, 9 aa, Homo sapiens
PAAKRVKLD

SEQ ID NO: 29 - protein, 10 aa, Homo sapiens
RQRRNELKRS

SEQ ID NO: 30 - protein, 38 aa, Homo sapiens
NQSSNFGPMKGGNFGGRSSGPYGGGGQYFAKPRNQGGY

SEQ ID NO: 31 - protein, 42 aa, Homo sapiens
RMRIZFKNKGKDTAELRRRRVEVSVELRKAKKDEQILKRRNV

SEQ ID NO: 32 - protein, 8 aa, Homo sapiens
VSRKRPRP

SEQ ID NO: 33 - protein, 8 aa, Homo sapiens
PPKKARED

SEQ ID NO: 34 - protein, 8 aa, Homo sapiens
PQPKKKPL

SEQ ID NO: 35 - protein, 12 aa, Mus sp.
SALIKKKKKMAP

SEQ ID NO: 36 - protein, 5 aa, Influenza virus
DRLRR

SEQ ID NO: 37 - protein, 7 aa, Influenza virus
PKQKKRK

SEQ ID NO: 38 - protein, 10 aa, Hepatitis D virus
RKLKKKIKKL

SEQ ID NO: 39 - protein, 10 aa, Mus sp.
REKKKFLKRR

SEQ ID NO: 40 - protein, 20 aa, Homo sapiens
KRKGDEVDGVDEVAKKKSKK

SEQ ID NO: 41 - protein, 17 aa, Homo sapiens
RKCLQAGMNLEARKTKK

SEQ ID NO: 42 - protein, 107 aa, Homo sapiens
IEVMYPPPYLDNEKSNGTIIHVKGKHLCPSPLFPGPSKPFWVLVVVGGVLACYSLLVTVAFIIFWVRSKRSRLLHSDYMNMTPRRPGPTRKHYQPYAPPRDFAAYRS

SEQ ID NO: 43 - protein, 9 aa, Homo sapiens
IEVMYPPPY

SEQ ID NO: 44 - DNA, 7629 bp, Trichormus variabilis
  misc_feature (109)..(145): n is a, c, g, or t
ggggaattgtgagcggataacaattcccctgtagaaataattttgtttaactttaataaggagatataccatggtgctttaacattagatgtcgttaggcgttgagcannnnnnnnnnnnnnnnnnnnnnnnnnnnnnnnnnnnngtgctttaacattagatgtcgttaggcgttgagcagatccgaattcgagctcggcgcgcctgcaggtcgacaagcttgcggccgcataatgcttaagtcgaacagaaagtaatcgtattgtacacggccgcataatcgaaattaatacgactcactataggggaattgtgagcggataacaattccccatcttagtatattagttaagtataagaaggagatatacatatgattattgatagtaacttagttacgcagcttccctcagaatcatcttcaaagccaagagagcttttaatgtctcagtttccatatatggatttaacttttagccttacgggtgagacattacctttcgaccacggctatgaattattttctgcgatcgcccactttgaacccaaactacatacattagacacgttgggaattcagaccattgcaggtattcccaaggatggtgtaattaatctgacccaaaattctaggcttcgtattcggataccagtaaatcaggtacgtttggtttatccattggcgggtaagtcactgagaattggcaagcatacaattcgtttgggtattcctgacatctgtttgcttcaacctgcggagaaactgcgatcgcgcattgtggtaataagaggctatgaagaacctgaaagttttttagtcgtagcgcagcgtcagctagaacaactgggtatccaagcaattgctagcattcccaccaaagccaatggcaaaccaatacgtaggactatcaaaattaagcgatttacagtcgtgggttttggattagaagttataaatttaagcgatgaagactcactgaggttgcaaatacatggtgtaggaggaaagcaaaagatgggttgtggactcttcatgcctattaaggaaaggcaatagcaattactcgaaagcagatgatgaagagagcagataaccccaaaattcagcttaatctcggcgatcctagtatgactttattgcatcgtgctggggttgcaggactttggatgacgctcaaaaaactggaaaaaatctatccaacacctgctgaacgtattggtaatttaacttggttgctaacccctcactatatcaatcttgattgggaaggacaggatttcacagttttagactggttgctgaagcaatcatttcaaatcagcgatgagggtttaatttccctgacagggttagattctcaaaacatggatattcaaaatcaaataattatccatcaaggtatcacagccacttttacacaacataataaattttttaagtctgcgggtcaacaatctaagcaactaattattgatggtattcaggttagggttgattataagaaagctgcttcctatgctcatcaacattttgctaaacatttatgtgaccagtacggacaattgctaaaagagccaattggtatcaggggatggctctatccaggagcagtagttcgccattatgcttttaaagaacaaacagcatttgaagaaaaagcagaatatgctctagcgttgttgttcgctcctatggcttgtcaatattttgtgctgcgatcgcacaccgaaccatcacatacaaactatgttttggttattcctgaagtaattgatttagaactttatgcacattttttgtggtgtttgggtaacttagattataaacattttcacgtatctagcttaggagatgctggattaaaatttcttaattataaaacaacacaaatgcctacttccaattttttaaaacgatgtcaaataatcttttttagtacaaaagcttggtcagaacagcaaaaaactcgtgcagaaatagcaatcatagaattaaattcttcagttaattatctttataagcttagttgtatttgttttccagaatgtcaaattgttttatataaaaatcaacattatttgcttccaagtttaataaaaggaataatcgccaataatctagcaatgggtcggtcttggtgggctaattggatttcatttattaaaaataaaaaatcatttaaacaatttactgatgagtataaaggaattaataagatgattcaggactcagaatgggatatagaagctcaaaagctatttattcaagcttgtcatgaagcattaagaaaaatatatgccaaaatttatagcagaacaaaagaaggtgaatacgctcaaatagaacgagaaaatacacgcattttatctcagttaaaacgctgcaccaatactgacaatttccgaaaatttattgcagagttttggggaagggcagggcaaatagcaattctggaagaacattggatggaattacttccattgactacagggataggcaattggaaagtggccagggacttaacttttattgcaatggctagctacccaaagaataaaataacagaggtagaggtaaaaccatcacaaatatcggagctaaatactgaataaacttcatattttttgatttgattaagaacaaaatattaattgtttaggtaatggtggaatgtttcatctgtttggtaatattttgactagttatggaaccgccgctaataatcgtggtgaaaatgaaggtaataccactacgttacaaaaattaatttggaaaggtgaagttcactctactgtttcatctgaggcaattcgttgggcattgcgatattattggcaaaatgctggctatcctgtgaatagacgttgggatgaaaatgctcaaccagtacccgatcacatcttgcaagatcctaattttgatgatattcgcttcattgatgatgatgtcttgggatttatgcaagcggaagcagcaaaagttgaagcagcagttgaatccgaagttgaaatccagaactcaactcaagatgaggacaaaaaactttctcaaggtaaggagaaagaaactgcaaaacgtaagcgtaaggaaaaacctaaagggaaaataactactagacgaggtgtattagaagtcactcgtgcagtttcaacaattccttatgctggtgatcttactttcaatgctatgagtggaaagaaaggacgaacatctctttattctacagaagttcatgctactcgatatcaatatggcttcgcattaacacccaatagcctcaaagataaatctcgcattaatgctgtcctcgatagcttaatttctattggagaagtggcaggaaatcacgctcgttttctctatgatttttctcctgatagcatcatattacggtggacacacgatttctcacctcggttactttactgttttgaagaagatgaacttagaaatatatcaacaccggatttagtaaggcgggtagaatctggagatatagaccctaaagaattatggataggaggggcaatttctagcactctggaagatttaggggcaaatgtgtttcccggagtgaagacaacagttgaagcattaaaacaggtgattattgaagatttgcagttgtcgttaaggagttcatgatatgacgacaattgccttaaaagtagaagttcccatagcttgttttcggcagtctcgtgctagggaatatggcgaaacttaccctgtaccaccaccatcgacagtatatggaatgttactatctcttgttggagaagtggatagatacaaacactgcggtgtgaagctggcgatcgcacttctatctgaaccagaaaagtcaactgttattcgcacctttcaccgatttaagacgaagaatatccatgactctaaaaataataaacctgattatcaggagttattaactaatatagaatttatagtttgggtggatgctggagtagataaagctaaaccaaatttagtggaacgtttagcagaggcattgactaacccggcttctattaataggtttggtggattatgtttaggtgaaagtcgggatttagtgaatgatgttacccttttacctaaaaattactatgcagaatcaatgcgatggttaattcgagatgaatatgggttactaactttaccttactgggtagaccatgtaggttcgcggggaacgcgatggctacgttacgagattcagaaatgtccagtctttcaaccacctgaattatcttggacttcagttcaaagtaattagcctaggctgctgccaccgctgagcaataactagcataaccccttggggcctctaaacgggtcttgaggggttttttgctgaaacctcaggcatttgagaagcacacggtcacactgcttccggtagtcaataaaccggtaaaccagcaatagacataagcggctatttaacgaccctgccctgaaccgacgaccgggtcatcgtggccggatcttgcggcccctcggcttgaacgaattgttagacattatttgccgactaccttggtgatctcgcctttcacgtagtggacaaattcttccaactgatctgcgcgcgaggccaagcgatcttcttcttgtccaagataagcctgtctagcttcaagtatgacgggctgatactgggccggcaggcgctccattgcccagtcggcagcgacatccttcggcgcgattttgccggttactgcgctgtaccaaatgcgggacaacgtaagcactacatttcgctcatcgccagcccagtcgggcggcgagttccatagcgttaaggtttcatttagcgcctcaaatagatcctgttcaggaaccggatcaaagagttcctccgccgctggacctaccaaggcaacgctatgttctcttgcttttgtcagcaagatagccagatcaatgtcgatcgtggctggctcgaagatacctgcaagaatgtcattgcgctgccattctccaaattgcagttcgcgcttagctggataacgccacggaatgatgtcgtcgtgcacaacaatggtgacttctacagcgcggagaatctcgctctctccaggggaagccgaagtttccaaaaggtcgttgatcaaagctcgccgcgttgtttcatcaagccttacggtcaccgtaaccagcaaatcaatatcactgtgtggcttcaggccgccatccactgcggagccgtacaaatgtacggccagcaacgtcggttcgagatggcgctcgatgacgccaactacctctgatagttgagtcgatacttcggcgatcaccgcttccctcatactcttcctttttcaatattattgaagcatttatcagggttattgtctcatgagcggatacatatttgaatgtatttagaaaaataaacaaatagctagctcactcggtcgctacgctccgggcgtgagactgcggcgggcgctgcggacacatacaaagttacccacagattccgtggataagcaggggactaacatgtgaggcaaaacagcagggccgcgccggtggcgtttttccataggctccgccctcctgccagagttcacataaacagacgcttttccggtgcatctgtgggagccgtgaggctcaaccatgaatctgacagtacgggcgaaacccgacaggacttaaagatccccaccgtttccggcgggtcgctccctcttgcgctctcctgttccgaccctgccgtttaccggatacctgttccgcctttctcccttacgggaagtgtggcgctttctcatagctcacacactggtatctcggctcggtgtaggtcgttcgctccaagctgggctgtaagcaagaactccccgttcagcccgactgctgcgccttatccggtaactgttcacttgagtccaacccggaaaagcacggtaaaacgccactggcagcagccattggtaactgggagttcgcagaggatttgtttagctaaacacgcggttgctcttgaagtgtgcgccaaagtccggctacactggaaggacagatttggttgctgtgctctgcgaaagccagttaccacggttaagcagttccccaactgacttaaccttcgatcaaaccacctccccaggtggttttttcgtttacagggcaaaagattacgcgcagaaaaaaaggatctcaagaagatcctttgatcttttctactgaaccgctctagatttcagtgcaatttatctcttcaaatgtagcacctgaagtcagccccatacgatataagttgtaattctcatgttagtcatgccccgcgcccaccggaaggagctgactgggttgaaggctctcaagggcatcggtcgagatcccggtgcctaatgagtgagctaacttacattaattgcgttgcgctcactgcccgctttccagtcgggaaacctgtcgtgccagctgcattaatgaatcggccaacgcgcggggagaggcggtttgcgtattgggcgccagggtggtttttcttttcaccagtgagacgggcaacagctgattgcccttcaccgcctggccctgagagagttgcagcaagcggtccacgctggtttgccccagcaggcgaaaatcctgtttgatggtggttaacggcgggatataacatgagctgtcttcggtatcgtcgtatcccactaccgagatgtccgcaccaacgcgcagcccggactcggtaatggcgcgcattgcgcccagcgccatctgatcgttggcaaccagcatcgcagtgggaacgatgccctcattcagcatttgcatggtttgttgaaaaccggacatggcactccagtcgccttcccgttccgctatcggctgaatttgattgcgagtgagatatttatgccagccagccagacgcagacgcgccgagacagaacttaatgggcccgctaacagcgcgatttgctggtgacccaatgcgaccagatgctccacgcccagtcgcgtaccgtcttcatgggagaaaataatactgttgatgggtgtctggtcagagacatcaagaaataacgccggaacattagtgcaggcagcttccacagcaatggcatcctggtcatccagcggatagttaatgatcagcccactgacgcgttgcgcgagaagattgtgcaccgccgctttacaggcttcgacgccgcttcgttctaccatcgacaccaccacgctggcacccagttgatcggcgcgagatttaatcgccgcgacaatttgcgacggcgcgtgcagggccagactggaggtggcaacgccaatcagcaacgactgtttgcccgccagttgttgtgccacgcggttgggaatgtaattcagctccgccatcgccgcttccactttttcccgcgttttcgcagaaacgtggctggcctggttcaccacgcgggaaacggtctgataagagacaccggcatactctgcgacatcgtataacgttactggtttcacattcaccaccctgaattgactctcttccgggcgctatcatgccataccgcgaaaggttttgcgccattcgatggtgtccgggatctcgacgctctcccttatgcgactcctgcattaggaaattaatacgactcactata

SEQ ID NO: 45 - DNA, 3959 bp, Trichormus variabilis
agcttgccattgcaactattggcttaccacatcgccgcccgtcgcggtttggatgtcgatcagcctcggaatttagcaaaatcagtgactgtggaataaataaatgtggaggaataattcggttcaacaatatataattcggttcaacaattaataaaacgattgaacaataacctctaaaggagtacgattgtaccaagtaaaagtgcgatcgcttccagaggttatttttatggttaggggtagaagggaatggcggggatccatggagaaaaaaatcactggatataccaccgttgatatatcccaatggcatcgtaaagaacattttgaggcatttcagtcagttgctcaatgtacctataaccagaccgttcagctggatattacggcctttttaaagaccgtaaagaaaaataagcacaagttttatccggcctttattcacattcttgcccgcctgatgaatgctcatccggagttccgtatggcaatgaaagacggtgagctggtgatatgggatagtgttcacccttgttacaccgttttccatgagcaaactgaaacgttttcatcgctctggagtgaataccacgacgatttccggcagtttctacacatatattcgcaagatgtggcgtgttacggtgaaaacctggcctatttccctaaagggtttattgagaatatgtttttcgtctcagccaatccctgggtgagtttcaccagttttgatttaaacgtggccaatatggacaacttcttcgcccccgttttcactatgggcaaatattatacgcaaggcgacaaggtgctgatgccgctggcgattcaggttcatcatgccgtttgtgatggcttccatgtcggcagaatgcttaatgaattacaacagtactgcgatgagtggcagggcggggcgtaatttttttaaggcagttattggtgcccttctagagtcccgggatatttacgttttgtaatcacgaatagattcttgattgcaagatgaattgcgatcgcatctttgtcgcacagcagaactttctcaaataattttgaacttatggaattactcaaaacctttatcagtaatggattcaaacaattgtttaaccgttttatttgagatttttactaaaaatcaagtttaccatagaggttaagctgaaattgttcaatcgttttattttatcgacaacggcagattaaatattcgaactgtaataattgtttaaccgaattctttgtctacaaatatttgtagagtagataagataatttctagatgtgactactatatcacatctaggtaccgagctcgaattcactggccgtcgttttacaacgtcgtgactgggaaaaccctggcgttacccaacttaatcgccttgcagcacatccccctttcgccagctggcgtaatagcgaagaggcccgcaccgatcgcccttcccaacagttgcgcagcctgaatggcgaatggcgcctgatgcggtattttctccttacgcatctgtgcggtatttcacaccgcatatggtgcactctcagtacaatctgctctgatgccgcatagttaagccagccccgacacccgccaacacccgctgacgcgccctgacgggcttgtctgctcccggcatccgcttacagacaagctgtgaccgtctccgggagctgcatgtgtcagaggttttcaccgtcatcaccgaaacgcgcgagacgaaagggcctcgtgatacgcctatttttataggttaatgtcatgataataatggtttcttagacgtcaggtggcacttttcggggaaatgtgcgcggaacccctatttgtttatttttctaaatacattcaaatatgtatccgctcatgagacaataaccctgataaatgcttcaataatattgaaaaaggaagagtatgagtattcaacatttccgtgtcgcccttattcccttttttgcggcattttgccttcctgtttttgctcacccagaaacgctggtgaaagtaaaagatgctgaagatcagttgggtgcacgagtgggttacatcgaactggatctcaacagcggtaagatccttgagagttttcgccccgaagaacgttttccaatgatgagcacttttaaagttctgctatgtggcgcggtattatcccgtattgacgccgggcaagagcaactcggtcgccgcatacactattctcagaatgacttggttgagtactcaccagtcacagaaaagcatcttacggatggcatgacagtaagagaattatgcagtgctgccataaccatgagtgataacactgcggccaacttacttctgacaacgatcggaggaccgaaggagctaaccgcttttttgcacaacatgggggatcatgtaactcgccttgatcgttgggaaccggagctgaatgaagccataccaaacgacgagcgtgacaccacgatgcctgtagcaatggcaacaacgttgcgcaaactattaactggcgaactacttactctagcttcccggcaacaattaatagactggatggaggcggataaagttgcaggaccacttctgcgctcggcccttccggctggctggtttattgctgataaatctggagccggtgagcgtgggtctcgcggtatcattgcagcactggggccagatggtaagccctcccgtatcgtagttatctacacgacggggagtcaggcaactatggatgaacgaaatagacagatcgctgagataggtgcctcactgattaagcattggtaactgtcagaccaagtttactcatatatactttagattgatttaaaacttcatttttaatttaaaaggatctaggtgaagatcctttttgataatctcatgaccaaaatcccttaacgtgagttttcgttccactgagcgtcagaccccgtagaaaagatcaaaggatcttcttgagatcctttttttctgcgcgtaatctgctgcttgcaaacaaaaaaaccaccgctaccagcggtggtttgtttgccggatcaagagctaccaactctttttccgaaggtaactggcttcagcagagcgcagataccaaatactgttcttctagtgtagccgtagttaggccaccacttcaagaactctgtagcaccgcctacatacctcgctctgctaatcctgttaccagtggctgctgccagtggcgataagtcgtgtcttaccgggttggactcaagacgatagttaccggataaggcgcagcggtcgggctgaacggggggttcgtgcacacagcccagcttggagcgaacgacctacaccgaactgagatacctacagcgtgagctatgagaaagcgccacgcttcccgaagggagaaaggcggacaggtatccggtaagcggcagggtcggaacaggagagcgcacgagggagcttccagggggaaacgcctggtatctttatagtcctgtcgggtttcgccacctctgacttgagcgtcgatttttgtgatgctcgtcaggggggcggagcctatggaaaaacgccagcaacgcggcctttttacggttcctggccttttgctggccttttgctcacatgttctttcctgcgttatcccctgattctgtggataaccgtattaccgcctttgagtgagctgataccgctcgccgcagccgaacgaccgagcgcagcgagtcagtgagcgaggaagcggaagagcgcccaatacgcaaaccgcctctccccgcgcgttggccgattcattaatgcagctggcacgacaggtttcccgactggaaagcgggcagtgagcgcaacgcaattaatgtgagttagctcactcattaggcaccccaggctttacactttatgcttccggctcgtatgttgtgtggaattgtgagcggataacaatttcacacaggaaacagctatgaccatgattacgcca

SEQ ID NO: 46 - DNA, 11096 bp, Trichormus variabilis
ggggaattgtgagcggataacaattcccctgtagaaataattttgtttaactttaataaggagatataccatggttaggggtagaagggaatggactcaagctaaatatgagcgatatataaaagaaggtcgtggccgaggaagtggtaagcactataaaccttggcttacaatccaagatgttccctctaaaggacgttcttctagaactcctggttggaaaacaaatcgagtacatcatttcttctcagaccatgaaaaacggctattttatttgtttgagtggtcagatatagtcacagatataagagagcaatttcctttagacaatctcgatctagccatgagtattgctacagacataggtataaagtaccctgtagatacacaaagtggcactcctcacgttttaacaagcgactttatgcttacagtcaaccgcgatgggaagcagatgcagattgcccggactgttaagccgtcaacagaactggagaaaaagcaagttaatgagaaattcgagatagaaagacaatattacttagcaaagggtattgactggggaattatcacagaaaaagaaattcccaggcttttagctgaaaatgttgagtgggttcattctgcttataggctagaagcaaattctgaaatggacactgcacaactgagtgaattgtcaacaattttaaaatctaagcttcaggaagaagatacaactataaatagagtaactactgctttagacaaagaaatgaatataaattccggtacatcactttatgtatttaaacatttaattgctaggaaagaaatccttgtggatctagtagcaataaaattatctgcttgtccgtcaactaaagttattgaaaaaataatattttagacccacatgataggtaaataatatggttaaagatttatttgtcaatgatttaatagagtggattgtataccaaaacactcatatagtcgaaagaattatttggatagatgaaggttacattattgcatttgttatagatattaatgctaagaaaggtctacctgaaccaaggaaaatatcagatattttagaagctataactgaaggtattgcttttaagcagcaacaagatccttgggcaagaattattcgggatgaaaatttgacagataaggaaaaggaatacagagataaagcttgggagataatttcatcattaattatagaagaaccatcaatatattatagaaattttagaggatcgatggttaaagaagcggttgaaaagtacaacgaagaaagggataaagataaattagtagaaaaaaccgtctatggttatttgagaagattttggcagagaggaaaaactataaatgctctcatacctgattttatcaattcatcaggtaagggcaagattcgaggacaatcgggcaagaagagaggaagaccaagaaaatatgcacatgacccagatattggtgaaggtgtaaatgttacagaagaagatagaaagatttttagagtatctataagcaaattttacaataatccaaaagaaaactacttaacaacagcctatgaattaatggtgaaagaatattacaaggaaggaattagatatgacgagaatggtgttcaaaaatctatattaaccccaactgataaaatacctacaattactcaattcaaatactggtatcaacttgaacaggatgatgttaccaaaactttaacatctcgaaaaggagccaagcgagtagctttagagaatagagcaattttgggaaactctaagatggaaactattggccctggttctagatatcaaattgatgccacagttgctgatgtatatttagtttcaaaatataaccgtgactggataattggtagaccagttatctatgtaattattgatgtttttagtagaatgattacaggtgtttatgtcggtttagaaggcccatcttggataggagcaatgatggcactagccaatgtagctacagataaaaccctgttttgccaggaatataacattaatattactgaaaatgaatggccttgcaatcaaatgccagatgcaattttaggagataggggagaattagcaggtatgacagtagaaacattaatccctaatctttatgttcgtattgaaaatgcagcttcctatagagcagattggaaagggttagtagaaagacactttcgtataattcatgaatatgtaaaaccttttttacctggttatgtggatacggattttaggcaaagaggtgcaagggattataggcttgatggcaaacttgatatagatcaatttactgagattattattcgtttaattgttcaccataacaataaacctcttactgaatatgaaagagatgaagcaatgattgctgatgatacccctcctatacctagagagttgtggaagtggggtatcgccaatcgttctggcagactcagaactttttctgaagatattgtcaaattgaacttgatgcctactgagaaagcaactattactgctaaaggcatcaaaatgagaggtaaggagatgtactatacctgtgatagtgctaaaaatgagcaatggtttgaaaaagctagaagtaatctcctttctaagtcagaaaaatcattgattgtatcttatgacatcagaaagccaaacttcatttatcttccatctagtgatggtagagattttgaaaaatgttttcttattgacttagaagggcggtatgctaataaaaactttcatgatattgaatatctgcttgcttatgaagaattgcaaagacagaaaagccaaggtaaacagctacaagaaaaggtagatttaatagctgatattgaaagcatagtagatagagcagaaaaaatgactgatgcttctcaatatcataatttaagtaagagcaagaaagtttctggaataagagataatagggcttttgaaaaggctaaacgacgagagaatgaaggatttgaattagcaattacagataatcagagcagttttcaggttgcagagagtacagcagaaacctccgaacagccagaatcactacagccaaaccatctgaatcttcttaagaaaaagcgacaggagcgaaaacgtggacagaattgagagtgaactggttaaaattcctaatggagaactagcagttattgccagatatatagatcaaaaactgccagaatacaacactaatccattaattcaggcattacctcctatcctatcagcagcagaatttatagataaagtagccagagaaccaaattttgatgaacaagagagagagctagaaccacattatagatttcattgtattgagaggttatctagatattttgaccctcaaaataaaactcttgaattacaaaaagttatttgtacgcttatcatgacaggctatctgtcaaggaaccttttaaaacctgaatatgcaaatcgctctaggcaaatttataatgcaataggtaatggaggaggtaaaaatttagaaaactatgttaatcttcctacatctgcgtccggcttaactctaattggcccatcaggtattggaaagactacaaatttcaaaaatattcttgagctttatccccaaataatttttcatcctgattatagtgtttaccaaatagtttggctgcgggtagattgccctaaaactttaaaggggttatgtatagatacttttgcaggtatcgataaattgttaggaactaatttattaaagaaatttaacccagcacgcacatctgaagattatctattggctcaacttgcacaaacagcacacactcatcatctaggagttttggtgattgatgaaatacaaaatttagcaactgcaaaaagaaatagagacgaaatattaaattttttagtaaagctcgataatactattggaattccagttattcgtgtaggtacgaatgaagccattagttttcttcaaggtaatcttagaaatgctagaagaaatactggagaaggaagtagaatgtgggatagaatggtaaataatgatgaatggtgttactttttagaaggaatatgggaataccaatggacaaaaacacctgttcatttctcggatgaaataaaagaagttttttatgatgaaagccagggaattattgatattgctataaaactttacaaaatggttcaatggagagcgatttcaataggtgaccaagaaattattacggttgatctgattcgtcaagtagctaaagaaggattgtatttagtaaagccaatgctagatgcaattaggttaggggacagagagtggatgattaaatataaggatattgctcctctcgatattacggaatatcacaatagatgtgtatctgagattgatgctaaagatttgacagagattaagagattagctaaaaagcagcagaatcagcagaaagtatctccgaagctcaattatgtaattagtgagctgttgaaattggaagtagaatctggtaaagcaaaggaatgtgcagaacaaattgtttatagtcatgaagatccagacattccaattccatctttagttaataaggcatatgctcttgctttgcaaggatgtcaagtaaatgagagtcttgctaaaacaagtaccaggaaagctaaattaaagacaaagtaccaagagaatgatattcggcgaattgtcgagaatgccaagaaagacaaaaaatctgcatacgaggatttgaaattagcaggtataatcaaaaatccagttgaagattttatcaatatttagcttctaaatgcttagttttttcccaactctgtatcccgatgaacttttatatagcactttagctagataccatattcggagtggaaataaaagtttcaagcaaactgacttagagctattcggttacagttcccaacaaatatgcaaaattaccttaactaataatttaaattatttagtgaaaaacttacctttacgctcccagcaaaaagttgagaatttactacaaaatcatactttatattccttttatgcaactttattaatgccgcaggaggcttggctgctgaaaaactcaatgagtaataaattcagtgggtctatactagattttgctaaagtggctaataattctagtgatgattcaaaaaaatttttaaaattttgccctgaatgtttagagaaagatacccaaaagtatggtgaaccttactggcatagaatacatcaagtccctggcattttagtttgtccaattcatcgtgttgttttacacaatagctgtatagaagttgaatcgaaaggcatacattatcatgctgccagcatagataattgtttattagcaaataatgtgaaaaaattgacaaataaaactgtagaaacactttcaatactggcacatgatattaattggctaattcatagcagttttgcctttcaaggtttggcttggcttcgcgctcagtaccagcgttacttattggataaaggactgctaaaaacctttgctggtggcaagtttaagtttaatgattgtggttttgcccagcttatatttgagttttatggtcaagaatccttagaagccctcaatccaaagctgacccaaaatcaaggtaaatatttttctcactgcttgtttggatgcgacttaaacccagcaattgaccgcataactcatatcttaatgataaaatttttagcaaattctatagaagagttctttcagtcataacttaagtcgaacagaaagtaatcgtattgtacacggccgcataatcgaaattaatacgactcactataggggaattgtgagcggataacaattccccatcttagtatattagttaagtataagaaggagatatacatggtgagttttttccctcaaccttatccagatgaaattttatatagtgttattgctcgttatcacattagaagtggcaatacgagtccaaaaattacattacaagatttatttaagtcacagactactgtggcgacagtagatttaccatcgaaccttagtaatttaattaaaaacctacaatttatctcaaattaccaagttgaagagttgatatataaacatactctctaccctttatatagcccttttttgccagcaaacaggtctagtcaggtactggaatctatgaaaggagattatgggggagatattcatacaagagccggaattatggcaagctcaattactatgccgaaatatttgcggttttgtccaacttgctgggaagaagacttaaaaaattatggcgaaccttactggcatcgcatccatcaaataccagggattttagtttgtccatttcatggtgaagttttgcaagatagcctagctcctttacatggttttaataagcatgaatattatgcagctagtacagacaactgttctattactaaagaacccagtattcttagccctgacacactgaaaaaattactaatattagccaaagatttttggtggttactcaatagtgaaataccttgccaagagccacagtggtttcgcaaacagtacacaaatctgatgattgagcagggttttgcaactccaactggtcgaatttaccagaacaaactactagataattttttgttcttttatggtcaagaaatgctcagtgctgttgattcaatggtaaatcataatgattcaaacaactgggttactagcatcgtcaggaaatataggaaatctttccatcctcttagacatctgctaatgatgcgttttttgaaaacatcagtagaggaattttttcaaaaagatactgaatacaagccttttggcgaacccccctggttgtgtctcaatgctgccgcagaacattatctacaaccagtgattaccaatttagtcattactttatgctgcgatacaaaaaagcctgtcggtactttttcttgtgcttgcggaatggtttattgccggactgggcctgatgaaacggatgaagacaaagttcgcattggtaaagtcaaggcattcggtcaaatatgggagcaaaagctgaaagaattggtggaagttgaaaagttgggtttgcgggagacagccagaagattaaatgttgatgccagaactatcaaacgttatgtatctcgtctaaaattgacaacttattggcagactagaacagaaaatgactctgtaggcttacagggagtcccagaaatagatcccaattttgcaactgaactcaaattaaaacacaggcaaaattggatggctttacaagtacagaaccctgaagcttcaaagacaactctgagaaaactagtaccagccacctatatttggctatacaggaatgacagagaatggctcaatcaaaactcacccactttacaagttgccgttccttccgttgtgagagttgattggcatgagcgagatcagcaaattctcgctcaggttcaagatgcagtgcgatcgctacttaaggctgatataccagagaaaatttctattagtagggtagggaaaactatcggcttacttgcattactcgaaaaacatctcgaccagatgcctttaacaaaggcttatttggaatcagtcgttgaaactgtagaagaatttcagatgcgccggatcaagtgggcaatcaagctgcttgatgaatgtggagaagaaattatgcgctggaaggtagtcagagttgctgctttgcgagaggattgctcccaaagagtcagtgcatttctggaaagtgaactggagaaagcatacaagaaagagaggtgattaattaacctaggctgctgccaccgctgagcaataactagcataaccccttggggcctctaaacgggtcttgaggggttttttgctgaaacctcaggcatttgagaagcacacggtcacactgcttccggtagtcaataaaccggtaaaccagcaatagacataagcggctatttaacgaccctgccctgaaccgacgacaagctgacgaccgggtctccgcaagtggcacttttcggggaaatgtgcgcggaacccctatttgtttatttttctaaatacattcaaatatgtatccgctcatgaattaattcttagaaaaactcatcgagcatcaaatgaaactgcaatttattcatatcaggattatcaataccatatttttgaaaaagccgtttctgtaatgaaggagaaaactcaccgaggcagttccataggatggcaagatcctggtatcggtctgcgattccgactcgtccaacatcaatacaacctattaatttcccctcgtcaaaaataaggttatcaagtgagaaatcaccatgagtgacgactgaatccggtgagaatggcaaaagtttatgcatttctttccagacttgttcaacaggccagccattacgctcgtcatcaaaatcactcgcatcaaccaaaccgttattcattcgtgattgcgcctgagcgagacgaaatacgcggtcgctgttaaaaggacaattacaaacaggaatcgaatgcaaccggcgcaggaacactgccagcgcatcaacaatattttcacctgaatcaggatattcttctaatacctggaatgctgttttcccggggatcgcagtggtgagtaaccatgcatcatcaggagtacggataaaatgcttgatggtcggaagaggcataaattccgtcagccagtttagtctgaccatctcatctgtaacatcattggcaacgctacctttgccatgtttcagaaacaactctggcgcatcgggcttcccatacaatcgatagattgtcgcacctgattgcccgacattatcgcgagcccatttatacccatataaatcagcatccatgttggaatttaatcgcggcctagagcaagacgtttcccgttgaatatggctcatactcttcctttttcaatattattgaagcatttatcagggttattgtctcatgagcggatacatatttgaatgtatttagaaaaataaacaaataggcatgctagcgcagaaacgtcctagaagatgccaggaggatacttagcagagagacaataaggccggagcgaagccgtttttccataggctccgcccccctgacgaacatcacgaaatctgacgctcaaatcagtggtggcgaaacccgacaggactataaagataccaggcgtttccccctgatggctccctcttgcgctctcctgttcccgtcctgcggcgtccgtgttgtggtggaggctttacccaaatcaccacgtcccgttccgtgtagacagttcgctccaagctgggctgtgtgcaagaaccccccgttcagcccgactgctgcgccttatccggtaactatcatcttgagtccaacccggaaagacacgacaaaacgccactggcagcagccattggtaactgagaattagtggatttagatatcgagagtcttgaagtggtggcctaacagaggctacactgaaaggacagtatttggtatctgcgctccactaaagccagttaccaggttaagcagttccccaactgacttaaccttcgatcaaaccgcctccccaggcggttttttcgtttacagagcaggagattacgacgatcgtaaaaggatctcaagaagatcctttacggattcccgacaccatcactctagatttcagtgcaatttatctcttcaaatgtagcacctgaagtcagccccatacgatataagttgtaattctcatgttagtcatgccccgcgcccaccggaaggagctgactgggttgaaggctctcaagggcatcggtcgagatcccggtgcctaatgagtgagctaacttacattaattgcgttgcgctcactgcccgctttccagtcgggaaacctgtcgtgccagctgcattaatgaatcggccaacgcgcggggagaggcggtttgcgtattgggcgccagggtggtttttcttttcaccagtgagacgggcaacagctgattgcccttcaccgcctggccctgagagagttgcagcaagcggtccacgctggtttgccccagcaggcgaaaatcctgtttgatggtggttaacggcgggatataacatgagctgtcttcggtatcgtcgtatcccactaccgagatgtccgcaccaacgcgcagcccggactcggtaatggcgcgcattgcgcccagcgccatctgatcgttggcaaccagcatcgcagtgggaacgatgccctcattcagcatttgcatggtttgttgaaaaccggacatggcactccagtcgccttcccgttccgctatcggctgaatttgattgcgagtgagatatttatgccagccagccagacgcagacgcgccgagacagaacttaatgggcccgctaacagcgcgatttgctggtgacccaatgcgaccagatgctccacgcccagtcgcgtaccgtcttcatgggagaaaataatactgttgatgggtgtctggtcagagacatcaagaaataacgccggaacattagtgcaggcagcttccacagcaatggcatcctggtcatccagcggatagttaatgatcagcccactgacgcgttgcgcgagaagattgtgcaccgccgctttacaggcttcgacgccgcttcgttctaccatcgacaccaccacgctggcacccagttgatcggcgcgagatttaatcgccgcgacaatttgcgacggcgcgtgcagggccagactggaggtggcaacgccaatcagcaacgactgtttgcccgccagttgttgtgccacgcggttgggaatgtaattcagctccgccatcgccgcttccactttttcccgcgttttcgcagaaacgtggctggcctggttcaccacgcgggaaacggtctgataagagacaccggcatactctgcgacatcgtataacgttactggtttcacattcaccaccctgaattgactctcttccgggcgctatcatgccataccgcgaaaggttttgcgccattcgatggtgtccgggatctcgacgctctcccttatgcgactcctgcattaggaaattaatacgactcactata

SEQ ID NO: 47 - DNA, 300 bp, Trichormus variabilis
ccgggatatttacgttttgtaatcacgaatagattcttgattgcaagatgaattgcgatcgcatctttgtcgcacagcagaactttctcaaataattttgaacttatggaattactcaaaacctttatcagtaatggattcaaacaattgtttaaccgttttatttgagatttttactaaaaatcaagtttaccatagaggttaagctgaaattgttcaatcgttttattttatcgacaacggcagattaaatattcgaactgtaataattgtttaaccgaattctttgtctacaaatat

SEQ ID NO: 48 - DNA, 152 bp, Trichormus variabilis
tgtggaggaataattcggttcaacaatatataattcggttcaacaattaataaaacgattgaacaataacctctaaaggagtacgattgtaccaagtaaaagtgcgatcgcttccagaggttatttttatggttaggggtagaagggaatgg

SEQ ID NO: 49 - DNA, 37 bp, Trichormus variabilis
tgtctcctgggaggattcataaagcattgtttgttgg

SEQ ID NO: 50 - DNA, 37 bp, Trichormus variabilis
gtctcctgggaggattcataaagcattgtttgttggc

SEQ ID NO: 51 - DNA, 37 bp, Trichormus variabilis
gattcataaagcattgtttgttggctacgagaagcaa

SEQ ID NO: 52 - DNA, 37 bp, Trichormus variabilis
gagaagcaaaataggacaaacaggtgacagttatatg

SEQ ID NO: 53 - DNA, 37 bp, Trichormus variabilis
aagcattgtttgttggctacgagaagcaaaataggac

SEQ ID NO: 54 - DNA, 37 bp, Trichormus variabilis
cataaagcattgtttgttggctacgagaagcaaaata

SEQ ID NO: 55 - DNA, 37 bp, Trichormus variabilis
tctcctgggaggattcataaagcattgtttgttggct

SEQ ID NO: 56 - DNA, 37 bp, Trichormus variabilis
tcctgggaggattcataaagcattgtttgttggctac

SEQ ID NO: 57 - DNA, 37 bp, Trichormus variabilis
ggattcataaagcattgtttgttggctacgagaagca

SEQ ID NO: 58 - DNA, 37 bp, Trichormus variabilis
ctcctgggaggattcataaagcattgtttgttggcta

SEQ ID NO: 59 - DNA, 37 bp, Trichormus variabilis
gaggattcataaagcattgtttgttggctacgagaag

SEQ ID NO: 60 - DNA, 37 bp, Trichormus variabilis
attgtttgttggctacgagaagcaaaataggacaaac

SEQ ID NO: 61 - DNA, 37 bp, Trichormus variabilis
taaagcattgtttgttggctacgagaagcaaaatagg

SEQ ID NO: 62 - DNA, 37 bp, Trichormus variabilis
cctgggaggattcataaagcattgtttgttggctacg

SEQ ID NO: 63 - DNA, 37 bp, Trichormus variabilis
agaagcaaaataggacaaacaggtgacagttatatgt

SEQ ID NO: 64 - DNA, 37 bp, Trichormus variabilis
tgggaggattcataaagcattgtttgttggctacgag

SEQ ID NO: 65 - DNA, 40895 bp, Anabaena sp.
ggttttgaattcaagtaacgcttcatatatgtttacaaatcggctaaatctctgattgggtgatgaggagaaatacgaggcggaaatgtggctattttataggaacagagagagattgccgaaaagtgaattttgagaagtgcctattaaattgtttaaagttatgtagccttttacttacgccgtataagccactgcggtaaactatgcgttgattatgattctttcacagataaagaacactggaaaggagccgttttttcaatgtctcataccgtaaaaatctacgatacctgcattggctgcacccaatgtgtccgcgcttgcccgactgacgttctggagatggttccttgggatggctgcaaagctgctcaagttgcttcttccccccgtacagaagactgtgtaggctgcaaacgttgtgaaactgcttgccccaccgactttttgagcatccgggtttacctgggcgcagaaacgactcgcagtatgggtctagcttactaaggaattaactgctaattcctgatttagttgaccattcagtgcctcgatagcaaacaactttagcattgtagggtgggcggcgatcgctcatcctacaatgtcaaactggaaaaatatgaatatacttcttgacacaggggctaacagctcctttttttgtggaactcgatatttagatcagcatctatacttgatgtaattatcctgaacaggtggtgtgagtaatgtgtggcatcgttgggtatataggcactcaaacagcgacagaaattttattagcagggttagaaaaactagagtatcggggatatgactccgccggaattgccacggtttgggaaggagaggttaattgtgtccgcgctaaagggaaactctacaatcttcgttctaagctggaacagtcagcaacaccagcccaaataggcatcggacacacacgctgggcaactcatggtaaaccagaggaacataacgcccatccgcatttagacacagctatgcgggttgctgttgttcaaaatggaattattgaaaactaccgcgagttacgcgaggaactgaaacagaaggggcatcagttccgttcgcaaaccgatacagaagtgattccccatctaattgcagaatatttacagcatcttccctcaccttctcaccccctcaccccctctgactttttagaggcagtgcgccaagctgccaatcatttagaaggggcatttgcgatcgccgtcatttcggctgactaccccgacgagttggttgtggtgcgtcagcaagcccccttagtgataggatttggtcaaggtgagtttttctgtgcttctgataccccggcaattgtcgcctatacccgcgccgtactccccctagagaatggcgaaatagcccgcctcacacctttgggagtggaaatttacaactttgctggcgacaggttgaaaagacaaccccgaatgctcaacttgaatcccacgatggtagaaaagcagggattcaaacacttcatgctcaaagaaatttatgagcaaccgggagtagtcagagctagtttagaagcatattttgatcatgataccgttaacctagacttaccacaggatttttacgcagatttagagcaaattcacatcgtcgcctgtggtacaagttggcacgctgccttagtgggtaaacacttactcgaacaactagcgggaatttctacccaggtacattacgcttctgagtatcgctatgccccatcacccctgacagccaataccttaattattggtgtcactcagtcaggggaaacggctgataccctagcggcgttagcaatggaaaaagaacgccgccaaggaaaagaagcgaaatatcaggcgcgacttttggggattaccaaccgcccagaaagtagcctcggtttgatggttccccatattattaataccctagccggaattgagattggggtagcggcgacaaaaacctttattgcccagttgatggcgttttatgccttagcattggatttagcggctcgtcgccagacactaccaccggaaaaactcacagaaattattcaaggcttgcgccagattcccaaggaaattgaggcgacattagaacgtcaggaagaaatcaccgaacacttagcccatgaatttgcggaaaccaaagattttatctttttgggtagagggattaacttcccgatagcattagaaggggcgttgaaattaaaagaaatcagttatattcacgctgaaggttatccggctggggaaatgaaacacggcccgatagctttgttagatgctaaagttccggtagtagcgatcgcagttcctggtactgtgtatgaaaaggtgatttctaacgctcaagaagccaaagccagagattcccggttaattggggtgactcctgtgacagatggcgaagccgcagaaatctttaacgatttactcccagtgtcatcagtggatgaattattatctcccatcctgacagtcgtacctttgcaacttttggcttatcatattgcagcaagaaggggtttagacgttgaccagcctcggaatttggcgaagtcggtaactgtggagtaaaataatactttaaataagtataattgtacaacaataaaaaagtcgtataacaaataaaaaagttgtacaatatataaaaaagttgtacaatatatcctgtgggtgcatatgcaagcatctacaggagtttttatggctagaagtaagcaagattggacgcaagccaagtttgagcgttactgtaaggaaggtcgtggtcagggcagtgggaaaaactatcagccctggatcaagattcaggactttccctccaagggtcgtgtttccagaccaccaggttggaaaacaaaccgagaacatcatctcttttctgataacgagaagcgactgttttacgtatttgagtggtcagatgcgatcgttgatattagagagcagtttcctctacttgatctggacttagcaattaatattgcggatgaaatgggtattaactatcccaaagatccgcaaagcaatacgccatatgttttagccacggattttatgctttctgtccagcaaggtaagaatatagttcagaaagcacgaacatttaaactaaccaaggatttgggaagtaagtcggtagctgaaaaatttgagttagaaaaacgttactttgctgccaaaggtattgattggggaataatcacagaaaaagaagtccctaaacaattagctgagaatgttgaatggattcatactgcttataaattagaagaaaatgcagatataaatcttgaagaattacgtaacatcgcaaatattttaaagtttagacttcaggaaagtgatgcaagtatcaataaaataacaacggttttagataaggagatgaacatagagtctggcacatctctctatctttttagacaccttattgctcggaaagaaatcattatggatatgctggtaaataaaatatctagttgtccatcttctaaagaaattcaaaaaataattttttaagctaggacgaggtactttatatgattaatgatttgtttgtaaatgacctgattgaatggattgatgaatccggtaataactttatagaacgagttctctggattgatgaaggatatattattgcctttgtttatgatataaatgctaaaacaggatttccagaggctaaaaaagtttcagagattagagaagctatttctgatggtcgtgcattgaagcttaaatcagacccgtgggcaagaatcgtaagagatgaagatttgtcagagaaagaaaaagaacttagagatagggcttggcaaataatttcatttatcgttactcaagaaccctcaatatactatcgggattatagaggtactttagttcagcaggttattgaaaaatataatgcaggtagaactgaaggtgaattagtaccaataactgtttataaatatttaagaagattttggcagaggggtaaaaacaagaatgctctcttgcctgattatgcaaattctggtggtaaaggaaagcctaaatcttctggagacaagaagagaggaagacctagaaaatacgcacaagttccagaaattggtgttggaagaaatgttacagaagaagataaaagaatatttagatttgcaactgctaaattctataataattccaaagaaaatttcttaacgactgcttatgatttaatgattaaagaatattacgctgaagatttttattacgatgataatggagttaagaaaagtattttaattcctccagataaacgacctacatttacccaatttaaatactggtacgaagtagaacaaactgatatcagaaaaactatgatatctcgtaagggttcgagaaaatatgccttagaaaatcgagccattaccggaacttcccaaatggaaactattgggccagggtctagatatcaaattgatgctacgattgcagatgtatacttagtatccctttacaaccgcaactggattattggtagacctgttatatatgtggtgattgatgtttttagtcgcatgataacaggggtttacattggattggaagggccatcttggacaggagcaatgatggctttagccaatgcagctacggagaaggtcaagttttgtcgggagtatggtattgagatttctgaagatgagtggccatgcaagcatattcctgataccattttaggcgacagaggtgaattagcagggatgacagtagaaacattaatccctaatttaaatgttcgtattgaaaatactgctccttatcgagcagattggaaaggattagtggaaagacaatttcgcattattcatgggtatgtcaaaccatttgttcctggttatatagatactgactttagacagagaggaggacatgattatcgccttgatggtaggcttaacatagatgaatttactaaaatagttatatttttgattctccagcataacaatcatgattatctaattgattatgctagagatgaaatgatgattaccgatgatgttaatcctatacctagagaattatggcaatggggaattgccaatcgttctggtagactgagaacttttccagaagatattgtcaagctaaatttaatgcccacagaaaaagcaacaattactgctcgtggtatcaaatttaaaggaatgtactacacttgcgagaaagcaaggaaggaattttggtttgaaaaatctagaagtagtttattatctaagtcagagaaatcattgaatatatcatatgatattcgacagccaaactttatttatttacgttccccaaacggtagagaatttgaaaaaggttggcttttagaatcgcaacaaagatatttagataaaaacttttatgacattgattatttattagcatatgaaaaattgcaaaatcaaaaacatcaaggtactcggttacaggcaaaagctgatctgatagccaatatagaaagtattgttagtcaggctaaagaagagactgaggcagttttagatgatactataagtaatagacaaaaagttagtggcattcgacagaatagagcagacgaaaaaaatgctcgacgtaaaaatgaagcatttgaactagcaaaagcagaaactcccaatactgataatactaagaatctaataaacactcaatctgaagattccgaggattcaaaactattacagcctgaccatatggatttactcaaacggaaaagacaggagcgaaaacgtggaaagtaatgaggaagaagttgttagtattcctaatggaaagtcagcagttattgccagatacatagaccaaaaacttccagaatataacgctaatccattgattcaggcactacctcctatcctctcagcagaagaatttatcgataaagtaacgagaacaccagattttgatgaacaagagagggagctagaagcgcactacaggtttcattgcattgagaggctatctagatattttgatcctcaaaataaaactgttgaactacagaaggtcatttgtgcgctaattatgacgggctatttagctcggaatattctgaaacctgaatatgcaagtcgctctaggcaaatttataatgcaattaaagatggaggagggaaaaacttagaaaactatgttaatcttcctacatctgcttccggcctaaccctaattggcccatcagggatgggaaagtctacgaatttccaaaatattcttaatctttatactcaagtaattcttcatcctgagtatagtgtttaccaaatagtttggttgaaggttgactgccctcatgctggttctttaaagggtctgtgtacggatatttttcttgctgttgacaggctattaggtactaactactttaaaaagtttggttcctcacgcaactctgaagattatatgctggctcaagttgcccaaattgcccatactcatcatttaggggttttagttatagatgagatgcagaatctggttacagcaagaagacgtagctcagatatgttgaattttttagtaaaaatggacaatactgtaggaattccagtaattcgagtaggtactaatgaggcttttcctattcttcaaggaaattttagaaatgccaggagagggacaggagaaggcagtgtaatttgggacagaatggtaaatgatgatgaatggtatttcttcatggaaggaatgtgggaataccagtggacaaaaactcctgttcctttctcggatgaaataaacgaggttttttatgacgaaagccagggaattattgatattgctgtcaaactttacaaaatggttcaatggagagcgatttcaataggtggtaaagaaattattactattgagttaattcgtcaagctgctaaagacggactatatttagtcaagccaatgcttgatgcaattaggtcaggggacaaggagtggatgattaagtataaagatattgcgcccctagatactacagaatatcaaaataaatgtctatctgagcttgattccaaggatttgaaagaaattcgcagattggcaagaaagcaacagaatcagcagaaagtatcgccgaagctaaattatgtaattcttgagcttttgaacttggaagtagaacctgctaaagcaaaggaatgtgcagaacaagtaattgtttctagtgatgaagatgccgaaattccatctttagtcaaaaaggcatatgctcttgctttgcaaggagggcaagtaaatgagagcctgactaagacaaatactaagaaagctaagttaaagcccaattatcaagaaaatgatattcgacgaattgttgaaaatgccaataaggagaaaaaatctgcatacgaggatttgaaattggcaggcataatcaaaaatccagttgaagattttataaatatttagcttctcaatgcttagtttcttcccaactctgtatcccgatgaactgttatatagcactttagctagataccacattcggagtggaaataaaagtttcaagcaaactgacttagagctattcggttacagttctcaacaagtatgcaaaattactttaactaataatttaaattatttagtgaaaaacttacctttacgctcccagcaaaaagttgagaatttgctacaaaatcatacgttatatcccttttacgcaacttttttaatgccacaggaggcttggttactaaaaaactcaattagtaaaaaactcagtggctccatactagatgttgctaaggtggctactaattctattggtgattcaaaaaaatttttaaaattttgtcctgaatgtttagaaaaagatacccaaaaatatggcgaaccttactggcatagaatacatcaagtacctggcattttagtttgtccaactcatggtatcgttttacaggatagttgtgtaaaagttgaatcgaaaggcgtacattatcatgctgcgagcgtagataattgtttagtagcctgcaaggtcaaaaatttgacaaataacacagtaaaaacactcttcacactggtgaatgatattaattggctaattcatagcaattttgcctttcaaggtttggcttggcttcgcgctcagtaccagcgttacttagtggataaaggtctgctacaaacctttcctggtggcaagtttaagtttgatgagtatggttttgcccagcttatatttgagttttatggtcaagaatccttagaagccatcaatcccaagttgactcaacatcaaggtaaatacttttctcactgcttgtttggatgcgacttaagcccagcaattgaccggataactcatatcttattgataaaatttttagcaaattctatagaagagttttttcagtaataatctgcatataaaaactgttaaatacattaatataaagtaataaataattaagaaaattatctttataggttggtatttcaagtattctcagattcgtgagtaaggtaaagtaagtaatatcatatttatttcacaccacgttgcatctactgaaatttggcatctaaaaatgattgttgatggcaacttacttaggcagattccctcagaatcaccaccaaagccaagagagcttttaatgtctcagttaccatatatggatttaacttttaaccttattggtgagacattacctttcgaccacggctatgagctattttctgcgatcgcccactttgaacccaaacttcatacattagacacgctgggaattcacaccattgcaggtattcccaaggatggtgtaattaatctgacccaaaattctaggcttcgtgttcggataccagtaaatcaggtacatttagtttacccattggcgggtaagtccttgagaattggtaagcatacaattcgtttgggtattcccgacatatgtttgcttcaacctgccgagcaattgcgatcgcgcattgtggtaataagaggtcatgaagaacctgaaacttttttagtcgtagcgcagcgtcagctagaacagctgggtatccaagcaaccgctagcattcccaccaaagccaatggcaaaccaatacgtaaaactatcaaaattaagcgatttacagtcgtgggttttggattagaagttacaaatttaagcaatgaagactcactgacgttgcaaatacatggtgtaggaggaaagcaaaagatgggttgtggactcttcatgcccattcaagaaaggcaatagcaattactcgaaagcagataatgaagacagcagctaaccccaaaattcagcttaatctcggcgatcctagtatgaccttattgcatcgtgctggggtggcaggactttggatgacgctcaaaaaactggaaaaaatctatccaactgctgctcaacgtattggtaattttacttggttgctaacccctagtaatatcagtctttattgggaaggacaggatttcacagttttagactggttgctgaagcattcatttcagatcagtgatgagggtttaatttccctaacagggttagattctcaaaacatggatattcaaacgcaaataattatccaccaaggtatcacagcaacttttatacaacataataaattttttaagtctgcgggtcaacaatctaagcaactaattattgatggtattcaactcagggttgattataagaaagctgcttcctatgctcatcaacattttgctaaacatttatgtgaccagtacggacaattgctacaagagccaattggtataagggggtggctttatccaggagcagtagttcgccattatgcttttaaagaacaaaccgcatttgaagaaaaagcagaatatgctctagcgttgttgttcgctcctgtggcttgtcaatattttgtgctgcgatcgcacaccgaaccatcacatacaaactatgttctggttgttcctgaagtaattgatttagaactttatgcccagtatttgtggtatttgagtaaattagattataaacattttcacgtatctagcttaggagatgctggattaaaatttattacttatgaagcaaaacaactagataatttcaattttatcaaacgatgtcaagtaatctcctttagtacaaaagcttggtcagagcggcaaaaaactcgtgcagaaatagcaatcatagaattaaattcttcagttagttatctctataaacttagttgtatttgttttcctaattgccaagttgttatatataaaaatcaacattttttgcttccaagtttaatgaaaggaataattgccaataatctagcaatgggttggccttggtgggctaattggatctcagttattaaaaataataaatcatttaaacaatttactgatgagtatataggaattaataaaatgattcaggactcagaatgggacatagaagctcaaaaattatttattcaagcttgtcatgaagcattaaggaaaatatacgccaagatttatagcagaatgaaagaaggtggatatgctcaaatagaacgagaaaatacacgcattttatctcagctaaaacgctgcaccaatgctgacaatttcagaaaatttattgcagagttttgggggagggcagggcaaatgacaattctggaggaacattgggtggaattactaccattgactacagggataggcaattggaaagtagccagggacttaacttttattgcaatggctagctatccaaagaataaaataacagaggtataggtaaaatcatcacaactatttgagctaaatcgtgagtaaacgttagattttttgatttgattaagcacaaaatattaattgtttaggtaattgttgaatgtttcatctgttcggtaacattttgactacttatggaaccgccgctaataatcgtggtgaaaatgaaggtaacacaactactttacaaaaattaatttggaaaggtgaagttcactctaccgtttcatctgaggcaattcgttgggcattgcgatatcattggcaaaatgctggctatcctgtgaatagacgttgggatgagaatgctcaaccagtagcggatcacatctgggaagatcctaattttgatgatattcgcttcattgatgatgatgtgttgggatttatgcaagcggaagcggcaaaagttgaagcagcagatgaatccgaagttgaaatccagaactcaactcaagatgagaaccaaacaacctctcaaggtgaggagaaaaaaacctcacaacgtaagcgcaagcaaagacctaaagggagaataagtgctagacgaggtgtattagaagtcactcgtgcagtatcaacaattccttatgctggtgatattactttcaattctatgagtggaaagaaaggacgaacatctctttatgctacagaagttcacgctactcggtatcaatatggctttgcattaacacccaatagactcaaagataaatctcgcattcatgctgtcttagatggcttaatttcgattggagacgtggcaggaaatcacgctcgtttcttttatgatttttctcccgatagcataatattacggtggacacatgatttctcacctcgcttactttactgctttgaagaagatgaacttagaaatatatcaacacccgatttagtgcgacgggtagaagctggagatatagaccctaaagaattatggataggaggggcaattgctagcactctagaaaatttaggggccaatctttttcccggagtgaaggcaacagttgaagcattaaaacaggtgattattgaagatttgcagttgtcgttaaggagttcatgatatgacgacaattgttgtaaaagtagaagttcccatagcttgttttcgccagtctcatgctagggaatacgctgaaacctaccctgtaccaccgccatcgacagtatatggaatgttactatctctggttggagaagttgatagatacaaacactgcggcgttaagctggcgatcgcacttctatctaaaccagaaaagtcaactgttattcgtacctgccaccgatttaaaacgaagaatatccatgaatctaaaaataataaacctgattaccaggatttactaactaatattgagtttgtagtttgggtagatgctggggcagataaagccaaaccaaatttagcgcaacgtttagaagaggcatttactaacccagcttctattaataggtttggtggattatgtttaggtgaaagtcgggatttagtgaatgatgttagcctgttacctgaaaattactatgcagaatcaatgcgatggttaattcgagatgattatgggttactaaccttaccttattgggtagatcatgtaggttcacggggaacgcgatggctgtgttacgaaattcaggaatttcaagtatttcaaccacccgaattatcttggacttcaattcaaagtgattagagggcattatttacttttgcaagcatctttgcttgggcaatttaaataccacaataaataatcttgtcttcttgtttcacaagcattttagggatttcatatactttcaatgtgcttgcaatttcctggaacaccttcaaaacaagggttagagctttagcaactttgcttttgctatgaatagctattaatttttgcaacttgactaatcctaattggaaggtgcttgtaaaattagtacagagctttggctagtcaacaggtttgatgatcgccgtgctttaacattagatgtcgttaggcgttgagcagtgattaacctgaaggcttgctccgggatgttgtaggtgctttaacattagatgtcgttaggcgttgagcagcaccggtaccgcgagtagtcgcaccaatattcatatgtgctttaacattagatgtcgttaggcgttgagcagttgaatgcgaagttatcggcagatgttttgttgttgtgctttaacattagatgtcgttagacgttgagcagtgaccattggtgtatccatcaatcctgactgctgcgtgctttaacattagatgtcgttaggcgttatctacttttgatacaaatacttttgaaatacatacaaaactagctctgccaaatatctccttttcaagacatttttgcgattattttttcccactgctcaatctggttctgtagttgtaattgccgatcgcccaaatcttgactatcatcaacagacaaatcctgaccgctcaatcgctcacgatagagagcaatcagttcggttagggcttttttattgcttgctgatcctcctgggtcagagaactaacattgactggaatcaactttctgccaattctctctacaaactcagaccgacttaaatccatactgtcggcgatcgcatctaatccatcaatcccggtaggagttagggctaggttaactcgtttcttcacctcatcgtacagttctggtacgtctttttgacctttttgccctttcttacccattgccgtctagtttttgctttcctcccaatcatagtaaacacatttagcacttaagttaaacattaaaattttttccaatactttaggtattgtgtaatccctaatttagttagataatacaggcattgtgtaatgcctaagcaggcatctcgtaaggatatgagtaactaattgcaccgtttgattcctcaacatctcaacggcttaattttcatgggcaagcattaattgcttcgtggccaattcagattaatcaaaatctgccagatgatttaggcatttttcaaaactatatggttagtttcttccctaaaccttatccagatgaaattttatatagcgtcattgctcgttatcacattagaagtggcaatacgagtcccaaaattacacttcaagagttattcaattcacaaactactgtcgcaacagtagatttaccatcgaacctgaataatttaattcaaaacctacaatttatctcaaattaccaagttgaagatttgatatataaacatactctctatcctttatatagcccttttttacctgcaaacaggtctagtcaggtactggaatctatgaaaggagattatgggggagatattcatacaagagccggaattatggcaagctcaattactatgccaaaatattttcggttttgtccaacttgctgggaagaagacttaaaaaattatggcgaaccttactggcatcgcatccatcaaataccaggggttttagtttgtccatttcatgatgaagttttgcaagatagcctagctcctttacacggttttaataagcatgaatattatgcagctagtacagacaaatgttctattactaaagaaccaagtatttttagccctgacacgttgaaaaaattactggtattagctaaagatttttggtggttactcaatagtgaaataccttgccaagaaccacagtggtttcgcaaacagtacaccaatctgatgattgagcagggtcttgcaactgcaactggacgaatttaccagaaaaaactactagataattttttgtttttttatggtcgagaaatgctcagtgccgttaattcaatagtcactcataatgattcaagcaactgggttactagcattgtcaggaaacataggaaatctttccatcctcttagacatctgctgatgatgcgttttttgaaaacatcagtagaggaatttttcaagcaagataataaatacaagccttttggtgaacccccgtggttgtgtctcaatgctgccgcagagcattacctacaaccagtcattaccaatttagtcattactttatgctgcgatacaaaaaagcctgttggtactttttcttgtacttgtggaatggtttattgccggactgggcctgatgaaacggatgatgacaaacttcgcattggtaaagtaaaggcattcggtcaactatgggaacaaaagctgaaagaatttgttgaagttgaaaagttgggtttgcgggagacagctagaagattaaatgttgatcccggaactatcaaacgctatgtatctctgctaaaactgaccacttattggcagactagaaaggaaaatggctctgtagacttacaggaagtagcagaaatacaccccaattctgcaactgaactcaaattgaaacacaggcaagattggatggctttacaagcacagaatcctgacgcttcaaagacaactctgagaaaactagcaccagccacctatatttggctatacagaaatgatagagaatggctcaatcaaaactcacctgcattacaagttgctgttccttccgttgtgagagttgattggcaggaacgagatcggcaaattctcgcccaggctcaagacgcagtgcgatcgctaattaacgccgatacgccagaaagaatttctattagtagggtaggaaaaactatcggcttactcgccttactcgaaaaacacctcgaccaaatgcctttaacaaaggcttacttagaatcagtagttgaaactgtagaagattttcagatgcgccggatcaagtgggcaatcaagttgcttgatgaatgtggagaagaaattatgcgctggaaggtagtcagagttgctgctttgcgggaggattgctctgaaagagtcaacgcatttctggaaaatgaacttgacaaagcgtacaagaaagagaggtgattccattcacctctccaagtgatgagataaatgctttgtgtgttatgctgcgtcggctaccagtaagccattcacagcgacgatgatgatttgcgctgccaaaggagtgtcacaacgtagcttatcgtcactattacagggttgtgctatccattgaccctccagattttggtagaaagtgccgagaagttgggaaccattccaaacacggtaaagttcaccaaatacctctgataccgaatcaatctcaatttccggtgctatttcctcacctagctgctcaatgtactcctcaaactctaattgagccaaggcttggttatcaaattcatcctgtacaatcatcatgagtcacctcgttaacggggttgaacaaaaggcgatggcgtaaaacgcccgcctaaaaggcgatcgcatttctcttgccggagggcgatcgcctttttgatttcagattttattttagctactatagtggctatatacaatatatgtatggaaaactttattcagtcacttccactgtgctaagaaaatcctttaaagaaatgcctaaagccaagcaaatagcctctaacaccttgatagagacactttcagactcgccgtactctagttttttcaggttttggtgagagcattccccacccttagcagaaatttcctctgccaatttctgccgggattttttaccacgcatacgctttaaaactgctgctctatctttattccagctaacggccacaacgtctgaaacataaatatacattttagtttctctattcctctcattgttcatataatagctacagcagtaaacaaaagttattaatttcggctactacagtttacaaattatgggttagaggtaagcgatcgcagttaatcaagttttcctgtcagtcaaaagagagtaactgtttttgctatgaataccacttgtgcatataatttcaaaggttctcccagaacaaatacattagccatctacagcatctagagccttgacacccgaagaactaaaacagcttgaagacaccctatggcagagtgcagataccctgcgggctaactctgacctcacatcgaatgaatattcgacccctgtaatgggtttaatatttctcaagtttgctgataataaatatcgtcagtatgaagcggagattttacaggcttatgaagcattaaaagggactcgtagagagaagaatatagaagaaatagctattgagaaatgtggtttttatttaccaaatcacgcgcgttatgactatttattaaacttaccagaagaggaagatatagctaaaaaaattaaagaggcgatggagtccatagaaaattataagccagaactcaaagacacattgcctaaagatgaatatttccgcctcactcgtacagacaaaggtattcctaaacaactattaaaaaatttttctaatattcctcaaaacgccactggggatatatttggacgaatttatgagtattttttaggtaattttgcactttcagaaggacaaggtggaggtgagttttttacaccccgttctgtggtgcggctaatggtagaaattattgaaccattaaaaggtagagtatttgatcctgcttgtggttctgggggaatgtttgtacagacaggacaatttattcaagaacagcaagaaaatcaaaatcagggtgtaattaatgatttatatgtttgtgggcaagaaaagagactggaaactgtaaaactagcaaaaatgaacattacagttaatgggttaaggggagaaatcaaacaagcaaatacgtattatgaagacttgtttaatagtcttggcgattttgattatgttctggctaacccaccctttaatgtggatgatgtaaatctgacacaggtggagaaagacccgcgatttaatacctatggtatcccccgcaataaaacaaaagttaaaaagcaggatgagggtaaacaaacagtacctaatgctaattatctgtggattaatttgtttgctacatccctaaaacctaaagctagagcagcgttagtaatggctaactcggcttctgatgcgcgtcacgcggaagcagatattcgccaaaagctgattgaagagaatttaatttatgggatgcttgctctgccctcaaatatgttttacacggtgacgctacctgcgacattgtggttttttgataagggcaagaccgatgataagattttgtttattgatgcccgaaatatttttacccaggttgacaggtcacatcgagaattttcagcagaacaaatcagtaatctggcggttattagttatttgcgtcagggtaagcgacatcggtttattaagttgattaatcgctattttcagcaaggaatggcgaagttaaaagaaaatcaatcacaggtaaagcctgtttctcagcaattaatggctgtgttgaatgatggtgcagatgatgtcaaagctagggaagttgctgttaatttcctcaatttgtgggatgaggtaacagatttagaaattcagtatcaaggttatttagataaatataattatcctggaataaatattgatacccaaaatgaggcacagcaaaaactaagtgccgcatttaaaccgttttttgataatttccatgttgagctaaaacagcttgataagactgtgcgcgctcgtgaagcagagctaaaggagaaagcaaaggaagcagaggcgaagaaacgggggcagattgataaacaaattaaggaactgaaaagcactttggaaacgctgcatgaggaggtaaaatcagcagaattattttttactcatattcgctggttacaggaacgttttcctaatgcaaaatatgaggatgtgacagggttgtgtaagttggcaactttggaggaagtgaaagaacaggattattcgttaaatcctgggcggtatgtgggggtagtgattgaggaagatgggaaaacggaagaggagtttattgaggagattttaggtttaaatgaagagttggaaaaattaaatcaagatgtgcatttgttagaggggattattgctcataatttacgtgagatagcgggggatttatgagtgattatttaaatcaatttcagaaattagatgaagtggggactattgcaagaggtaaatcaaaacatcgcccaagaaatgagccatcgttatatggtggaaaatatccatttattcaaactggagatgtaaaacatagcaatctttacataactgagtattcccaaacatataatgaaaaagggctatctcaaagtaaattatggcaagcaggtacattatgtataacaattgcagctaatatagctgatactgcgatattaaaatttcctgcgtgctttcctgatagtattatcggatttataccctacaaaaataaagctgatgttcgatttatcaaatattgtttagatacatataaaattcaaattcaggcaatttctcaaggcacaacacaagacaatttgagcgtagaaaaacttttatcgcttaaatttagaattccattaatttccattcagaaaaagattggggcgatactttcagcttatgatgatttgattgaaaaaaataatcgccgtattgccatattagaaaaaatggctgaggaaatctaccgtgagtggtttgtccgtctgcgctttccgggacatgaacaggttaagtttaataaaggcatcccggaggggtgggagagaaaaagattcgatgaattttgtctactccagcgtgggtatgatctaccagatgctaaagtaattcctggccaatatcctgttatcgcttcaacttcaattaaaacgtaccataatcaatttaaagttaaccctccagtaattacaactggtcgctcaggctctcttggcacagttttattcatcaatagtcaagcctggcctttaaacacgacattatttttaaaaaacttttatggtaattcaccatacttaatttactacacactaaaattcttaaaactggaaaattttaattctggtgctggtgtacccacactaaacagaaatcatttgggtggattgtatatgtctgttcctcctaaaaacttgcaaaataattttactgacaaaatagcaattatttttaaacagaaagagcttttagttaggttaaataataaacttgttgaaacacgcgatcgccttctcccccgcctcatctcaggtaaactttccgtcgaaaacttagacatccaattcccaccgagtatggctgacacaccaccataaaagtaatactcagtgtttatcctataaagtcagggcagatattgacaaatttaagcagcaatgggctaaaatttgtacattgatggactaataatatcaaaaacagcctatagccgtgtagtttgcctaaactatgcctaactttatctctgaagatgacatcgaacaagcggtactccgcaaattagagcagcagcacggttttaaattactcaactgctacaccccaaaccctgacgacctcaacgacagttcaaaccgcacagataaacgagatgtcatttttagcgatcgcctgaaagctgcggctatacgcctcaaccccaccttaccagaaacagccatagatgaagctttaaaaatcctcaccagtcaacgtcagtctatgtctcccatcgctgcaaatcgggaaatagacgggctgattcgtgacggtatccccatacaatatgaaaatgcccaaggtagaaccgaacccatcaaagtacgagtaatagattttaacgatttcaggacagatttcaataatgaatatttagccgtttcccaactgtggattaaaggagaaagaaattatcgccgtcctgacatcatcctctacatcaacggtttacccctggttttcattgaactgaaaaattccaacgtcaaattacaaacagcctttgacgataacctcaccaactacaaaaaagatattcctcaactcttccttgccaatgctttctgcattctttccaatgcactagaaaccaaaattggcagttttaccgcagactgggaaaacttctttaactggttacgggtagaagatgaaaaggaaaaaataaatcgtcagcagattcaggaatctggtactagcctagaacgagccatagatggtctttgtcaccctgccaaactcctagactacatcgagaattttattatttacagaagtggaactcagaaaattgtcgcccaaaatcaccaattcattggtgtgaatcgcgcaattgatgcctttatccatcgggaagaaaaacaggggaaattaggcgttttctggcacactcaaggctcaggaaagagcttttctatgattttttatgtccgaaagatttcgcgcaagctcaaaggcgattttacctttgtggtggtaacagaccgggacgatttagacgggcagatttaccgcaatttcttaaacaccgaaaccgtccaagagaaagaagctgctcaacccaaaaacagtaaacaactgcgggattttctttctttcaacaagcggatagtttttaccttgattcaaaaattccgctacaaaaagggcaagaagtatccaatattgagtgaacgtaacgatatcatcgtcattgttgatgaagcacaccgcacacagtataaatccttagcggaaaatatgcgggcaggtttacccaatgccaactacctcgcgtttacaggtacacctctgttaggtaaagaacgcaaaactaatgaatggtttggggattatgtcagcgaatacaacttttctcagtcaatagatgatggtgctactgtccccctgttttaccagaagcgagtaccagaggtactgattcaaaacgagaatttaagcgaggaattttaccaaatactcgaagatgaaaaccttgatgatacgcaacaagccaagctagaaaggaaatttgcccgtgaaattgaggtcattaaacgtgacgatcgcttagaaacagtagccaaagatatagtttaccactttccccgtcgtggttatctaggtaaaggtttggtagtttccgtagataaattcactgctgtgaagatgtacgacaaagtacagtatcactggaaagcagaaattaaaaatttagtgggacgaattaggaaatctaataatgaaatcgagaaagtgcgcctcaaaaagattctcgattttatgcgcgaaacagaaatggctgtagtgattagtttagaaggaagcgagagcgaagagaaaaaatttgctcaacaaggactcgatatcaaaccccaccgaaaaagaatgaatacccttgatgctcaaggtcatgatatcgagtatcaattcaaagattcagaaaatcccctgcgcttggtgtttgtctgtgccatgtggttgacaggttttgacctacctaccttgtctactctctacctagacaagcccatgaaagaccacacgctgatgcaaactatagcccgtgcaaatcgcgttagtagttatcagattaataatgtcactaaaaccaacggcgagattattgattactacaatgtcttccgtgatatgaaaaaagccctagcagcttacgctttgggcaatgatgaaaactccctagttccagaaaaatctgacctgtttaaattacttgatgatgcgatcgcgcaaggactaaacttttgtcatgaacgaggcattaatctagaaactatccttgccagtcaagataccttcaagaacttagagcagtttaaccagtttgccgacaccctactgcaaaaagatgaatggcgtaaagcctttgtggtttatgacaataccattacctcactctacgaagcctgtaagccagagatattaaaccaaccacgccccctggtgtcagtttttcaatacttacgaggagtcattgatagtattatcgagcgcaaagatattggtaacgtcagtttaaaaattgccgagttattagatgaaagtatagtcacagatgatcaaggagtgaccacacaagagtatagtgcgaaataccaaattatccagaaaggtgaagtttgggatttaagtaaaatcaactgtgagcagctaaaagccgaatttaaacacaaaccctataaaaatattgcaattaccgatttaaggagcttcatcgaagacaagctcaaccgcatgattcagcaaaatactactcgtacagactttgcccaaagactacaagcaatcattgacaaatataacgctggtggttcatcaactgagaactactacgaagccctggtaaactttgccgaaaacctgaaacaagaagcagaacggcatattcgggaaggcttgacagaagacgaactggaactatttgatttactcaagaaagacaaaatgactgcggatgaaacccagaaagtcaaattagctgccaagtcccttttacagcgactcacagcagagcagccaaaagttttagtgcaagattggtataaagatatgcagagtcaacgcagggtgaaatccgtagtggaagcagtcttagatcaaaatctgcctgaaagctatgatcgagcgttatttaagtttaaatgcgacacagtatttgatttgatctatgaccaggccagtaaaggtgcaaagtgggcagtctgagtaatggaaactatgtctatctatgaacgcgatcgcatgaagacgaaaatcagatttatgagatttgtacggctggcataatttatcactgctttcgacttttcaagtagctctacttaagcgataattagaacttgaagacacatgatgactataacaaaatgggccagcatttatacgctttacttgttggtatcgacaactatcctgaccccaatcatcgccttcaagggtgtgtgaacgacataacagtaatacaagagtatcttaacgaacgggtcgatcagcagcagtatgaactgcattcattgatacttaaaaatagtgaagccactcgtcaggcggttattaatggcttccgcaaccatctttgtcaagctcaacaaaatgatatagttctgttttactacagcggtcatggttctcaggagttagcaccgaaagaattttggtatttagaaccagaccatctggatgaaactttagtatgttatgacagtcgtactgagaacggctgggatttggctgataaagaattggcactactgattggggaagtcgcagaaaacaacccccatatcacaattattttagattgctgtcactctggttctggtactaaagatcccatgcagacagctaaggaacgtcgcttccccacagacaagcgatcacgtccattagatagctttatcttttccctcgacgatttagagagactttcagatacccacaaccccgaaaaacacccgactgggtggaaaatccccagaggtcgtcatgtacttttagcagcttgtcgagaccacgaaacggcaaaggaatactatggtggtggccaacaccggggtagtttctcctatttcttactggataccctttctaaaactaacggaaaactaacttatcgagatttatttgcacgcaccaacgctattgtccgcagtgaaattacagaccagtctcctcagttggaagtaaatgatcctgaagatgacaataaattttttctcgatcgcgtgatcgctgaacatgacccctattttatcgttcagaatcacagaacctacggatgggtaattgatggtggtgcagttcacggagttcaagcacctgaacatggagaaactactttactagcattgtttccctttgatgccaatattgatgatctacgtgacccatcgaaatctgtgggtatagcaaaagttactcaggtactaccaggtaagagcaaaatagatattgaaggtatacaaaacttagctgctgataacacttttaaagcagttgtgacgagtctacctctaccacctttaggagtgtactttgagggagatgaggatggtgtcaccatagcaagggaaaagctgagaacagtgggtaatggtaagtctccatcaccatatctccgcgaagagaaagaagctagtcaagctgagtttcgtctgttgtgtcacaacaaccaatatgtaatagccaaaccaacagatagccgacctcttgtagaacagattgatggttacacaccaaaaaatgcagaaatagcaattaaacgcctagaacatattgcccgttggacaacaattgctaaactttcaaatactgcggcaactcggattaaagctggtgatgtgaagatggaacttatctttgctgatgaggatttaccacaatcaaaccagatgcgtttgccatacaaatataataatggaacatggcaacgaccagaatttagacttaaactcaccaatacgacgaaaaagccacttttctgtgctttagttaacctgtcagatagtttctccattagtaccccgttttttgaagcaggtagcattagactggaagcagaacaggaagcttatgctttagatggagaagaattgcaactagaagtcccagacgagtattgggaacagggtatcacggagtacaaagacattattaaattgattgttagtaatgatgagtttgatccaagattgttaaatcaaagcaaacttgatgctcctcggcttaaagcaatagataggaattatgcaaatcaaagtagtcttgatcggttgatggatcgtactcaaaatcgagaaattagagcgaaaagtgacgctgttagatttgatgattggtacgctgaagaaatcacaattactacagtccgtcccctgcaatctacaccagtttctcagcaacaagaacaacaattaggcgcaggggtaagattacaaccacatcctaatttagtggcaaatgttagcctcacaactataccagaagtgagccgagatttgggtaacaacattgtacctcctatcttgagagaaaattccgaagttattcaaccgttccaatttactgccagtcgtgctactgaccctggattaagtgtattggaattaaacgatattcaagattacaaagttgttactcctaatgcacctctaaaattatttgttgatgcaccactagcagataatgagtatattcttcctatcggctatgacggagaatttttcttgccgttaggtcgtggtcataaaactttacatggtcaaacagaaattgagatagaacaattaccagccccagttagtcaaggagagaaaagcctacaaggttctattcgcatcttttttcaaaaaattatcaaccaaaaattaggaaaaaaatataactatcctctactcagagtagtagaagttaatgataatcaacaagttaattatctaccagatgaggtaactattaaccgagttaaggaagcaaaaagaattgctgtttatattcatggaattattggcgatactgaaagtttagtggcaaccatcaaacagcctatattacaaccagacagacaaacagtttctatcagcgaactttatgatctaattcttacctttgactatgaaaatctcaacacttccattgaaaataatgctcaatatttaaaaaagcgattgagagatgtaggtctgggagaaaatcacggcaaagaattacatattattgctcattcaatggggggattggtatctcgttggttcattgaaagagaaggaggaaataaagttgtccaacacttgattatgttgggtacaccgaatgcaggttctccttggccagttgtagaagattgggtaaaactcactttaggtattgcacttaatggtcttgctatcattgcttggactgcaactgtggtagctggactaatgggtgctttagaaagaaatattcgggtagcattagcccaaatgaacccagcttctgattttctcaattctctagcagccagtgatgaccctggtattccttactcaattattgctggtaatacttctatgattacatctgttgttccagcagcattagagcaacaaccagagaaaaattctagtgtgctagaacgactcaagcaaagtttatttaatagagttgtagctttaccttttggtggtgaaccgaatgatattgctgtgacggtggaaagtattaatagcattcctcaagggcgatcgcatcctccccatattcaagaagtaccttgcgatcacttgagttacttcctgaatcaacctgatgaagttgggttacaagctttgattgcagctattacgaatcaagaatattcttatggagagttacaaaaaccttataaagatcaagaattacagggactttatgaaggattacaagatttatgggaaaaacaagaaattcatacttgttctatttgctcgaattttatcacagttaatcaaaaatttgaaggtgctagtaatgttgagtctttcattgcgaaaaacagaaaaaaagtggaaaatataattgttgaaattaatagcacatattcggcaaaagaaataaaagataacttacatcaaattgcaattatagggttctacagaagtaacagtttccgttcgttacctgcaattatttcccaaaaagataattttttacaaatcgagcttgaagacatttttagctttttagatcctaaagaaaatcaacaaactgaaaatattccatctttttcaacagagataattttgtttgccgtttactatcagaaggagaataaacatggatactaagaaagtagaagaggtaaggaagacaggatgtactcttattgcttttaaagatggtaagtatgaaagagcagcatctgaagattttaaaacagaagctgacatagttattttaattcatggctttacgagtcatggagaatacatgggtcaggaattagtaccttatctttatagtgaaaattatcaaatcttcttgtttaattatgattcttacaaaggaatattatctgctgtaaggagtttacaagaattactggaaacgtatgataatctaactaatcaaaaaatacgctccaagaaaatattccttattgggcatagtatgggtggtcttgtagctcgtcaatttactatagatgatgcaaagaaggacaattcagataggtttataaaaggagtgatcatgttggctactcctaataatggtgtattacaaaataaattaagtaacgaaaattggagaaattttgttaagtatttaatatctgtttcagaagaaataggcggagtattcccacaagccagaacattggagtgcgtcgcggtaaaagaacttgctaaaattgatgagtataatattattgataaattgaattacgaatgggaaaagatgagttgcaatttgccaccaagtttatctatatctggtggacaaaattatcttgaattcactaataaattaattgaaggaataattaatcgtggaattcagcaattaatatctgattctaatacccgctgccctaatgatggaattgtgcttgaatgcagtgttgatatgaactcatgtattagctatccccaacaaaatcaacaatatatacacctgaataattatcatgaatattcaaataccaatcacaatacaattcatatccaacaaatagtatcaattaaaattgtagaatggttacaaacaatcagcaaaaaaaatacgagtttactaaataacgcataataataaaattgattgtagtgcttttgaatttttagagttaacataacaattatgtctaaacataaatttaaccttaattttgctattattatcggtattaataattatcaaagcgggatcaaagagctagaaacggcagttccagatgctattaaacttgctgaaattctacaaaagcagcatgatgctctaaaaccacaatatcaagcacaaaataaatatgaagtgcaattatttttaaatcaacgcgctggtcttaaacaactgaatcaattaattgcagattttaaacaaggtcaaataccattagacagaggtaaagttacagttacagaaaatgatcgcctccttttttactttgctgggcatggaattgctttagatgctctagaaaatcaagaaggcccagtgggttacttaattcctcaagatgctatatcaggggatagcagtacctacttgccaatgcaggaattgcatgatgctttaaactcacttccttgtaggcatatgttagcaattcttgattgctgctttgcaggagtatttcgttgggcaagtctaaaaagagaaattgtgcctaaagtaaaagtatataaggaacgctacgaccgattcattagcgatcgcgcttggcaagtaattacttctgctgctgatgaccaaacagctttagattctttaggttcacggggtatggtcacagaggggaacgaagttcattctccctttgccaaagctttgtttgatggtttatttgggaagggtgcagacctaaataaagatggtatcatcaccgcaactgagctttacttgtatttaagagatcaagtcgaaatccttacagaaaataactacaagcggcaaacccctggtttgtgtccactgaaaaaacacgataaaggggaatttatctttttgtcgtctgaatttgaccgaaataatttggaggatgcaccgccactaaatttagaaaataatccctatcgaggattagaatcctatgatgaaaaacacagtcatttgttctttggtagagaagaacagattaaaaagctttaccagaaagtagttgctaacaaccagaagttaacattagttttgggtgcttcaggtactggcaaatccagtttggtgaaagccggacttattcctaaactcaggaaagataaaacttggtttatcctacccccttttcgaccaggggagtctcctttcaaatcattgaataacgcactagaatcggttaagcagcctttgattgctgcttcctcaacgacgacaccttctcgtttgcttaccccagccgaagaaagccttgcaaattggtttaataatcatcctcaagcaaagctactggtggttattgatcagtttgaagaactgataactctgtgtaaaagtgacaaagagcgagagcaatttgagcaactgattaaaaatgcaattaccaaatatgccgacaaaatccatgtagttatcaccttgcggcttgactttgaagcacagcttcaaaactctgtacttgaaaagttctggaatgatgagactcggtttgttgtcccaccaatgagccagaatgaatttcgggaagtgattgagaaacctgcactagaaaaagttatatattttgaccctcccagcttggtagatgacttgattaacgaagttgtacaaatgccgggtgctttacctttgctttctttcaccctcagtgaattgtacttgaaatatttgcaggagcggagagataaccgggctttaacgaaagaagattacgaacagttaggaagagtagttggttctttaaccaaacgagctaatcaggaatatgatcatttaattcaagaaaaccccgcttatgaaaacactgtacaacaggtaatgttacgaatgatttcattgcagggtagggagtcagcacgacggcaagttcctaaatcggaactggtgtatgccaatgaggaagaaaataaacgggttcaaagaattattaaatgcttttctgaagctcgcttaatcgttgagggttctaattctcaaggtgaaccttatgtggaaccagcacatgatgctttagtacaggggtgggttaagttacaggagtggattaaacaagagcaacagaatttacctttacaacgacgattgacattagctgtccttgagtggaaaactaagaaacaaagccaagataggcaagaagcaaagttcctttggaatgccgatccttacttagatgttttaaacaaaatactcaattccagtgacaattggcttaaccaagtagaaactgagtttgttaagtgtagcaccaacctcagagaaaagaatcgtcgcattagaatgggcttggttgctaccgcattctcttttatctccatattttcttttatacaatggaaacaaaatcaagaagctcagagtatcaacttgagtgtatcttcaaaaactttatttgctgctgatcaacaaatagaagcgttagtagaagccataaaatctgggaaaaagctcaaatctgtggttataccagaagcaagtaccactcaccaggttgtaacaactctatatcaattagtttacagttcgatagagtataatcgtttgcaagaagaaaaaggattttatcgtgctagttttagccctgatggcaagatgctggtttcagtaagtcaggacaatattatccaattgtggagcttagatggtaagaaacttaagaaaaattttaccagtaatctttcaagtgtagatagcatcaactttagtcccaacggcaaaatgctggctctggcaggtaataatgataattttatcgaattttggaatctggatggagaagataaacccaggacgcttaaaggaaaactttcaaaaacaaatagtgttagctttagccccgatggtacaatgctggctttaggaagtaacgacggcatcatccaattatggaatttagatagtaatgaagttaaaacttttactactaatcttaaaataaatagtgttagctttagccccgatggtacaatgctggctttaggaagtaacgacggcatcattcaattgtgggattttcgtagcaatgaaatcaaaaattttaatagtaagtataaaataaaaaatgttagctttagccccgatggtacaatgctggcttcagtaagtacaggaatcattcaattgtggagcattcaaacaggcgaaaaaatcggtgcgggaagggaactcgtaggggatgtggattgggttagtcgtgttagcttcagtcaagatggcaaaatgctggcttcaggtggctataacggcattattaaaatctgggacactgaaacaggtaaagaactcttaagcatccaagggagtcgaggtaggactggtgcgtcaattatggatatcacttttagtcctaacggcaagatgttagcttcagtagatgatgacaagtttatcaagctctggaatctgaatggtgagaataaatccaagatgctcaagggtcagctttcaaagataaggaatattagctttagccccaacggcaagatgttggctttggctggtgatgataagtttatcgaactctggaatctagatggacaggataaacccagaaaacttcaactacaagtttcaaagataaggagtattggctttagccctaacggcaagatgctggctttagctggcgatgataagtttatcgaactccggaatttagatgaacagtatgaacagtatcaacctggaaaacttctaggacataagtcacgtgttaatagtattagttttagccctgatggcaagatgctagcttcagcgagcgatgaccagacaataaaactatggagtctagatagaaacaaagaacccacaactttaaaaggtcatagtaatttggtcaattttgttagttttagtcctgatggcaacttcctagcttcatcaagtaaagaccacactatcaaactctggagattgaaagacaataaggaagtctggagtaagaaaattgggtctggttctggtggccaaacctggtgggttggttttagccctgatagcacaatattggcttcggtgggttcttacaattttatccagctctggaatctagacggtaacgaattcagaaggcttagaggtaatctttcaaatatcaatagtgtagccttcagtcccgacagcaagatgctagcctcagtagaaacgacagaagattcagtaggtaaagcagaggaaagcgtcatcaaattcttaaacttagaggggcttgaattcaataggctcaaaagccaatttgtagatattaataccatcagtttcagtcctgacggcaaacttttagctgtaggagttgaagatggcactgttatattacacaacttagatttagataatttattaagacgcggatgtcattggatacgtgattatttgcgaaataaccctaatgttagtgaggtcgatcgccatctctgtgacgatgtaccaccaattactacaaatcctgagaattaggtgagttaaaagcgaactgcaaccaccatatgtccaaatccaagtacgaattttaccgcgaccttgcagtaatcattgggattaataactactcaaatggtattccagagttagaaacgcctgtcgctgacgctgaaaaattcgccaaaattctccaagataattatcaatatgaggcgcagatattactaaacgaaaaagcgacattgaaagagttaaattctctactggaggacttcaagcaaaaaaaattacgcctaccagataaaactgtacagatagaagaaaatgaccgcttaatactttactttgctggacacggaatcgtcctcagagatgggctagaaaatacggataatctggaaggatatcttgttccccaagatgctagaggagatatcttgttgcaaaacaatattcttctacctatgcaagacttgcatgatgcactagcacaattaccttgccgtcatttgctaattatacttgactgctgttttgctggggcatttcggtcgagtttgtatagagaaattgtacctgcacgaaaagtttataaacaacggtacgatcgctttattagagatccagcatggcaagcgatcgcatctgcggctcatgaccaaaaagctattgaccatctaggttgttttggacagagaggaagcaaaggcaaacactctccttttgcaaaagctttgtttgacggtttgctgggtgctgctgacacaactctaagagaaggtgatggtattatcacagcaacagaactttactgttatttacgcgatcgcgttgaggaactaactgataaatatgacaaacgccaaactccaggtttatttcctctgaaaaagcatgataaaggcgagtatatcttcttgcttcccaacttcgaccaaaacaatttagaagatgcaccagcactcaagcaagaaaacaatccttatcggggtttaaagagctatgaagaagaacattctctcctgttttttggtagagatgaacttgtcaaagaactatctacccatgtttctcaaaccaataacccactcaccgtagttttgggtatttctggttctggaaagtcgagcttagtgaaagcaggactcattccttatttacgaaaacatcataaccaagaatggtacatcataccaactattcgcccaggagataattctttcacttctctggcagaggcacttgtagaaaagtctgaaacagatggaaattacttaaacaaaattaaatctctaaatcagacattaaaacaaataccacaggattttattaagataatacaagaattactactaatacctgaaaaagtaaaaattttattagttatagaccaatttgaagaactaatcacagtttgtaatccacaagaaaaagaacaatttttaaatttccttagcagtattttagaagctcatcctcagcaaatttccattgtattgactctgcgttctgactttgaacctcggtttttagattctgctctgaaagcatattggacacaatctcgttttcctatacgagctatgagatccgatgaattacggcaggcaattgaacgacctgctaacgaaaaaatgctcgattttgacccaccaaatttagttgatcagttgattgacgaagtggggcaaatgccaggagcattgtcgctattatcttttacattgagtgaactatatattaaagccataaatcgagaaagcagaactttaagtaagactgattacgatacattaggcggagttgcaggttcattaacacaaagagcaactcaggaataccaaacattagtgaaacttgatccagcttatgaacataccgtccgccaactcatgctgagaatggtagctattgaaggtaatgaattagcacgacgacgagtaccaatgtcagaactggagtatgagagtgtagaaaaaaatcaaagggtgtcgcgggcgattgctcagttttcggcggcacgtctaattgttgaaggtaaagaaactggtgacgaaccttatgttgaaccagcacacgatgccttagtaagcgggtggaacaaactacaggaatggaaaaatgatgagcaaggaagtttagttttgcgtcaacgcttaacaccatctgctaacgattggctaaaagatgggcgcaaatctgattatctatggattcgtgatcctcgcctcgctatcctggaaaaagtcctggaattgccatctgaagaaaactggctcaatcagctagaaacagaatttgtgaacaccagtattcagaaaagaaaggatgaacttgaagaaactaaagaacaactccgcatttctgaagagcgtcgtatcgaagcagaaaagcaaactgcgatcgcgcttgctagaaattctgaagccttactatcttctaatcaacaattagaagcactgattgcagcagtaaaggcaggaagaaaattacaaaatctactagcagaagaagctatttcttcacaaagtttgttattcaagcaaactgtgttattcaagcaaactgtgattgccctagaacgagcagtttatggagtgagagagcgtaaccgtttggaaggacatagcgggccagttcaaagcgtctgttttagtcctgatggcaagatgattgccactgctagttgggataatacagttaagctatggagtagggaaggtaaagaactaaaaactctgaaaggacattatgatggtgttttaagtgtctgtttcagtcctgatggtcaaactgttgcctcaactggttgggataacacgatcagaatatggaatctggagggacaggagcttacacagcaccctctcggatttggccatacagatcaggtatggtgtgtttgttttagtcctgacggagaaatgatcgcctctgccagtcatgacaggagagttaaactgtggaataaagatggacagtttctcagaaacctttgtgaatcaagtaccaccgagcatgaactaaccgtcagtagtgtttgctttagtcctgatggaaaaataattgctactgcaagttatgataacacagttaaactttggaatcttgacggtactttaattaaaagttttacacatagcggggcagtttatgatatcagtttcagccccgatggtaacactattgtttctgctagtgcagacaagacagtaaaaatttggagtttaaacggcaaaaaacaaactcttaaaggacatgaaggtgaatttacgagtgttaggtttagccctgatggaaaaataattgcctctggtagtaaagataattctatcaagctttggagtaaagacggtcaggaacttacaactctcagagggcatactgcggaaattactagcattaattttagccctgatggtaatatcattgcttctgctagtgaagattcaactgtcaagatttggaacaaagacggtcaacaaatcactatccttccagaatatggtgaaggggttactcaagtctgttttagtccagacggcaaaacaattgttggtaatgcgaaaaatacactcaaactctggaatcttgatactcaagagagcaaaatgttttctgatattactggtgcaaacaatggtatcagtttcagttttagcccagatggtaacgcgatcgcggtctgtggaggttttgacaaaatggttaaactttgcaatcttgaaggccaagaaattaagaactctaacgattattatcacgcaataagggctatccggttcagccctgatggtaaaactattgcttttaataataataaaaagattgacctttggaattgggagaatcaagagataaaaaccctgtcagggcatacaggcaaggtttgtagtctatgtttcagcccagacagtaagataattgtttctggtagtgatggttctgataagacaattaaactgtggaacctaagcagtggtgaagttatcatccttgaaggtcatagtaatagtgtaaatcaagtctgtttcagtccagatggcgaaataattgcttctgccagttctgataacacagtaaaactttggaatcttaatggacaagaactaaaaactctccgaggtcatagctatcaggtatttgatgtaacttttagccttgatgggaaaatgattgcttctgctgattgggatggcacaatcaaactttggaatcgtgatggtcaactgctcacaactttagaaaaacgaagtgaaaaactatccagtattagcttcagcccggatgttcaaatcctggctgctgccagtaataaaggagtaattttatggaacttcaatttagatgacttagtagcacgtggttgtaatttgttacatgaatacttaatgaataacactaatgttcaagaagagcaaaatctctgcaatgacagatgaataagcagtaagcaatatacgcaaaatagttcacagaaaataactgacattctcaaaactaaattagttattaacccaagttgctagttatgccgaagagcgatcgcagtgggttccattgccgcttcagaatggatagttaacatatactctcaaggcgactgtatttactgcttccctgcgtggcgtagccattcctgttacttaatgtttccggttttagtcgatactattaccatagcagcaatagagggattactgattaagcttgctctggagagcgatcgcaagttattttggaacaaatagatgccaaatccttacagggcttgctttcggcaaattatatgacttttttatttatcaatatgaggcatttctgaaaaattgtacaactttattttttgatatcaaataaaattgaacgtaaatacaaggcttataaactttcaaattatataagttttttatgtttttacaataatttggtagaataaccagataatttctgaatgtgatgataatattatcacaatcaggaatatttttttgggcgatcgcctacggtgctgatgcgtccacctcatcacttgtctataaataaaaaacaagcaggacatatactatgagccaaaaaaccattgattccaaaaatctgaccatagaaaaaatttttgaagatttttatattattcctagttatcaaagagaatatatttggaaagaaaaacaagtattagagttattaaatgatgtatatagtgaatttcctggctctttaaatatagaatctgatgaatattttctaggcagtattgtaatttgtcctagttctgaagatacagacaatgtgtatcaggtaattgatgggcaacaaagattaacaacttcttatatcttcttttgtgctgtcaaaaattatataaataagttgccagaacatcaaaagtttgatgcgattaagaaattaatttattcagagtatacaaatgcacaaggtcaagaccaatcacaatacaggataaatcctcaatatccagacagtaaaaatattttggaagaatttgctaaagatgaaatcaatatagaagagatagaaaataaaaaaaataataaaactgaatctacaattaatttgatttcagcttaccaaacaatagaagattttattaaggataagttcaaagatgatgaaaaccagatcaaaaggttttatgcacatttcatcaaaaaagtaaagttagttagagttgaaactacagatattaaccacgccttaagagtttttgaaaccatcaataatagaggcgttggcttggattctatggatttacttaaaaatcttttgtttaaacaagttgaaaaagaagatttttcaaaaattagtaattcttggaaagaaataaaaaatgaattagattcagtaaaggaaaagcctatggattttctacgatactttattctaactcaatatgatgttgaaagagataatgtccaaactaaagaataccaatggttactggaaaataatactacttgtaaatatgaagaaaaaccatttgagtttgtcgaggacttactgaaggctgcaaaggcttataaatcattactagaaagaaaaaatccttctgataattcagataacccgcatttagctaatattaagtatttaagccccaatcttaaacaacatctatatatactgttagcagcaagggatatgtcaatggaaatattttctcaattgtgtctacatattgaaaactttatttttgtttatagttttcctaataattcaatcagtgaattagaaaaaatatttattaattggggtcaagagattcgtaaaatagtacaaaatacagacaaagaagagcaattatctaaattaaaagaatttttatataacaatctaggtgtacgtaaagaaaatctcaagaaatcttttgagaaaaagtttaaggaagcaagtcaattagactttaattcaagaggaacaaataaaaagccaacatcaaatgctaataaaaaaacaaagtatatattagcaaaaatttctcagtatgtacaacttatagcttatagcgacaatgatgagtgtaaaaattttacaacttttactcagagttcaatagaaattgagcatattttaccacaagatttaaattctgaacctgttaaagcttttgataaaccagatgaagttgaatcatatatatacaaattaggcaatttagctttgctagaacaaactctcaatgcttctattcaaaatagtccatttgaagttaagaaagaagcttatcaacaatcgaattttcttttaacacaatgtatatctgaaaagcccactattggaactaatactgcaattaatagggctgtggagaaattaataagttttaatgaatggaattcacaatcaattgataaaagacaagaaatgctcacagaattagcattgaaaatatggtacgaggaagtatctttcgaagaagtaccttttgaggaaagtctggatgctagggaaatacaggaactattgcggtttggtggtgaaagagctatttaatttgatagcatctgatatcctttctacacctaaagtgccagttgcgtaagtcctgaacatatatagatagaaagtgagataagaacaggtaagagtaagctattcaaacacaacgccaattttcgatttgtaagttaggtattctttgaaattctcgaacattagatgtcaccacaatatgattattgatgactgcggtagctgcgatgagtacatcatacgcaccaataggtgaaccagctagtttgagaaagcttctgatttcggctgcttgttctgctgctttcgagtcaaaaggtaaaattgtgattgagtttaataatgtttcaaaaattgattggattttaacagcgcgttgtgggttaatagctaatccatatttcacctccataactgttagagatgacacaaaaatctccgcaggggaaattaattttattcgcttgagggtgttttcttctcctttgacaaaatcactaatgacgcaagtatccaatagataacccatacataattaaagttctatttcgttaggaggtatcagttcatctcgatatgattcaaagataatactttcgtttacaccttgatattgtattagggtttctggccattggctgggtttagtttctaggaatgtcacgaaaacaatgctttcagtaataccttgcggtgtttcagctagttcaattttgccgtttttataaattccttgaatggtttttaacatagagcttacctcctacattaagtttaacctatttattctccttcttcagtcatgctgggtgggaatcgaatgtctgagtcttcaatataaattttacctgagatgagacgatttatcaggcgatcgcgtgtttgtttaaggtgtaattttactaattggatataatcaatttgattgttcaatttacttgcaaatttacaaaagtttactgtgt

SEQ ID NO: 66 - DNA, 37 bp, Artificial Sequence
  Synthetic
actgctcaacgtctaacgacatctaatgttaaagcac

SEQ ID NO: 67 - DNA, 37 bp, Artificial Sequence; identical to SEQ ID NO: 66
  Synthetic

SEQ ID NO: 68 - DNA, 37 bp, Artificial Sequence; identical to SEQ ID NO: 66
  Synthetic

SEQ ID NO: 69 - DNA, 37 bp, Artificial Sequence; identical to SEQ ID NO: 66
  Synthetic

SEQ ID NO: 70 - DNA, 60 bp, Artificial Sequence
  Synthetic
atgccgtcgttacttcctaaagccagcattgtaccatcggggctaaagctaacactattt

SEQ ID NO: 71 - DNA, 60 bp, Artificial Sequence; identical to SEQ ID NO: 70
  Synthetic

SEQ ID NO: 72 - DNA, 60 bp, Artificial Sequence; identical to SEQ ID NO: 70
  Synthetic

SEQ ID NO: 73 - DNA, 60 bp, Artificial Sequence; identical to SEQ ID NO: 70
  Synthetic

SEQ ID NO: 74 - DNA, 39833 bp, Nostoc sp. NIES-2111
  misc_feature (34457)..(36961): n is a, c, g, or t
ttataaaaatacctagtggccaaaggagcaaacctgctccttttttctttggtaaagtttgttgatgattaacggttgactgtggactatggactattgactatgaactgttgactatactggaatttaattctcttgaagaaagggtggtgtgagcaatgtgtggcatcgttgggtatattggcactcaagcagcgacagaaatcttattatctgggctggaaaagttagagtatcggggttatgactcagcaggtgtagctacgctttgggaaggtgaggttcactgtgtccgagccaagggcaaactgcataacctccgttctaaactagagcaactagtaacctcctctcaaatcggaattggtcatacacgctgggcgactcatggtaaaccagaggagcataacgcccatcctcatttagatacagcaaggcgcatagctgttgtccaaaatgggattattgaaaattaccgcgagttacgggaagaactgaagcagaaaggatatgagtttcgttctgaaaccgatacagaagttattcctcacctcatagccgaattgtcaaaaaatgcctcctcttttctagaagcagtacgccaagctgttagccatctgcatggagcatttgcgatcgccgtcatttcggctgattaccccgacgaattgattgttgtccgccagcaagcgccgttagtgataggatttggtcaaggtgagtttttctgtgcttcagatacgccagccatagtttcccatacccgcgccgtcttacccctggagaatggcgaaatcgcccgtcttacacccttgggagtagagatttataactttgctggcgacaggctcaaaaaacaaccccggatgctcaacttgagtcccacgatggtagaaaagcagggattcaagcactttatgctcaaggagatttatgagcaaccaggagttgttagagcaagtttagacgcatactttaatacagaggttaattctggtaaatcattccaatcaccagttaagttaggtttacccgaacagttctacgcagacttagaacaaattcatattgttgcttgcggtacaagttggcacgccgctttagtagggaagtatttacttgaacaattagcaggaatctctactcaggtacattatgcttctgagtatcgttatgcaccatcaccgctaacagcgaatacattaattattggcgttacgcagtctggggaaacagctgataccttagcagccttagcaatggaaaaagaacgccgtcaaggtaaagaagcaaaatatcaagcgcaattcttgggtattaccaatcgcccagagagtagccttggtcatcttgtaccccatattatcaacaccttggcaggaattgaaatcggtgtggcagcaactaaaacctttgtcgcccaactgatggcgttttatgccctagccttagatttagcctatcatcgtcaaactgtagcgccggataaattagcagatattattcaaggtttgcgccagatacccaaggaaatagaagaaaccttagaacgccaagaaaaattaacggaacatttagctcatgaatttgcagagactcaagacttcatctttttgggtagagggattaatttccccattgcattggaaggggctttgaaattaaaagaaattagctatattcacgctgaaggttatccggctggggaaatgaaacatggccccattgctttattagatgcaaaagtgccagtagtggcgatcgctttccctggtactgtgtatgagaaagtcatttccaactctcaggaagccaaagccagagattcccgcttaattggcgtaacgccagtcagcgatggcgaagccggggaaatctttaatgatttacttcccgtttcccctgtggatgaattactttcacccatcctcacagtagtacctttgcaactattggcttaccacatcgccgcccgtcgcggtttggatgtcgatcagccaaggaatcttgctaagagcgttactgttgagtagtgttgaatcgagaaatattgaggttgtggaaacataataaagttgtacaataaataataaagttgtacaatgcctaataaagttatacaatttctcctatgggtgagtataattccatctgtaggagattgtctttatggctagaaccaagcaagagtggacgcaagctaagtttgagcgctacatgaaggaaggtcgaggtcagggtagtggaaaaaattatcaaccgtggataaaaattcaagattttccgtcgaagggtagggtatctagaccacccggttggaaaacaaaccgagagcatcatctgttctccgatcatgagaaacggttattttatttgtttgagtggtcggacagcattattgatataagggaacaattccctttaattgacttagacttagcgatgaacattgctaccgaaatggcgattgagtatcccaaagatgttaataataatactccctatgttttaactacagactttatgttatctgtgaagcaaggaaagcagatagttgaaaaagctcgcactttcaaattagttaaggatttaggaattaaatctgttgctgaaaaatttgagttagaaaagcgttattacacagcaaaagggattgattggggtattattacggaaaaagaaattcctacgcttttagtaaaaaatgttgagtggattcattctagttataagttagaagcagccgcagaaatcaatgttgatgagttgaataacatcgcaaatattttaaagtcaaaattgcaagaaagcgattctactattaataaaattacaaattgcttagataaagagatgaatctagaaataggtacgtcactctacatttttaagcatctccttgccaataagaaaataatcatggatatgcaaacaaatgcaatatctagttctatttcagcgcgagaaattcaaaaaatcattttctagaaatttatattggttgttcccatgaataataatttgtttgttaatgacttaattgagtggattgacgaatcaggaaacaactttgtagagagaattatttggattgatgaagcctatatcattgcctttacgatagatataaatatcaaaactggatttccagtgtctaaaagagtatcagatatccaagaagcaatttatgaaggtcgtgcattgaagttgaggacagacccttgggcaagaatcgttagagatgaagacttatctgctaaagaaaaagaaattagagataagtattgggatattatttcatctatagtaattcaagaaccatctatatactatcgagataaacgaggctcgctcattaaacaagttatagaaaaatataataataataagagcgaaggaaaattaattgaaagaagcgtttatcagattattaggagatactggcaaagaggtaaagataaaaactctctcttacctgattatgcaaattccggtggcaaaggcaaagtaagagcatctagagaaaaaaagagaggaagaccaagaaaatatgctcatgagccagacatcggtgtaggtataaatataaccgatgaagataagaaaatatttagattagcagttactaagttttatcacaatcaaaaagaaaactttttgacaactgcttatgatttaatgattaaaaactattattcagaggaaactatttacgatgagaatggcgttaaaaaacatatattaattcccccagataaacgaccaacattaacccagtttaaatattggtatgacgttgaacaaggagacattagaaaaaaaataatttctcgtaggggagctaaaaaatatgctctggaacatagagcaattacaggaaactcaacaatggaaactattgggcctggttctagataccaaatagatgcgacgatcgcagacgtgtacctagtttctgcgtacaatcgcaactggattgttggtagacctgttatctatgtagtcatcgatgtttttagccggatgataacaggagtttatgttgggtttgaaggcccttcttggataggagcaatgatggctttagcaaatgcagccagtgataaagtagcattttgcaaagaatacggtatcgagattacagaagatgaatgggcttgtcatcatattcctgatgcaattttaggcgatcgcggcgagttagcagggatggcagtagaaacactaattcccaatcttggtattcgtatcgaaaatgctgcaccctaccgagcagattggaagggtttagtagaaagacattttggcattatccacggtcatatcaaaccatttgtgccaggttacatagacaaggattttagggaaagaggagcaagagattatcgacttgatagcaagcttgatatagagcagtttactgaaattattatcaagatcatcctttaccacaacaatgaacattacttagataactatgaaagagatgaggcaatgatagctgatgatgttccccccatacctagagaattatggcagtggggaattgcaaatcgttcaggtagacttaggactattcctgaagatattgttaagctgaacttaatgccaacagaaaacgcaacgattaccgaacgtggcattaaatttaaaggaatgtactacacctgtcaaaaagcaaaaaacgaattttggtttgagaaagctagaagtaattctctttctaggttagagaaaaaattagaaatttcatatgacattagaaaacctgattatatatatcttcgctctcctgatggtagaaactttgagaaatgttttcttttagaatcagaatcaaaatattttaataaaaatttacatgaaattgaatatttatttgcttttgaagagttacaaaaacaaaaaaataaaggtttaaaacaacaacagaaagtagacttaatcgcagaaattgaaagtgtcgtgaataaagcaaaaaaaatgaccgaggaaatgaaagatgataaactgagcaatagaaaaagaaccgcaggtattcgagataatagaagtgctgaaaaatctaaacgtcgaaaaattgaaggctttgagctagaaaagagtgatcatgaaaatactagtaatactgtggatattgaaagtcaaaaagtagagcagccacaatcattgcaacctaactatcttgatattcttcgtcagaagcgagaggaacgaaagcgtgaacaagataaatgattggaaatgggttgaaattccaaatggtaaatctgctgctgtagctaaatataatgaccataaattaccagagtacaataataaccctttaattcaagcattacctccaattctttctggagaagaatttattgaaaaagcaataatactccccagttacgcacctgaagagagggaaatggatgcacaccgtcgatttcactgcgttgaacgattatctagatactttcaacctttaaataaaacggttaatttacagcaggttatgtgtgcattattaatgcagggctacatagcacgtaatatttccaaacctgaatatgcacgccgatcccgacaaatttatgaagcgataaaagcgggagatggtagaaatttagatgtttatgtaaatgttcccacatccacatccgcatctggtttaacattaattggcccatcaggcatgggtaaatctactaattttattaatattcttaatttatatcctcaagtaattctacatccagaatacagtacttaccaaattgtttggttaaaagtcgattgtcctcatgctggttctctcaaaggcttatgtacagatatatttcttggtatagataggttactgggaaccaactattttaaaaaatttggtgcatcacgaaattctgaagattatatgctggctcaagttgcccaaatggctcatactcaccatttgggagtcttagtgattgatgagatgcaaaatttagtaacagcaagaagaagttgctctgatatgctgaatttcttagtaaaaatggataacatcattggagttcctgttatccgtattggtaccaatgaagcttttccaattcttcaaggtaattttaggaatgctagaaggggaactggtgaaggaagcgttatttgggacaggatgagaaatgatgatgaatggtacttttttatggagaccatgtgggagtatcaatggacaaaaatatctactgatttttctgatgagtttaatgatgttttttatgatgaaagtcaaggaattattgatattgccattaaactttataaaatggttcaatggagagctatttcactgggtggaaaagaggcaataaacgccaatttaattaaacaatctgttaaagacggattatttttagtaaaaccaatgctaaatgctatccgttctggagacaaggaatggatgattaagtataaagatatagctcctattgatactacagaatattacaataattgtttatctaatttagaaactaaagatttaaaagaaattagtagattagcgaaaaaacagcaagctgagaatggacatttatcagcgacacaacgtcatataattcttaaacttttagaattagatgtagaaccgcaattagccaaagaatgtgcagtacaagtaattaattctggcgaagaagatgctgatattcctattttggtaaaacaagcttatgctctagctttgggtgggcaagttcaggaggctactgtaaagaaagtgagaacgcacacactaaaagcaaagccaaaatatcaaataaacgatattcgacaaattgcggaaaaagcaaagaaaaatcaaactagtgcatatgaaggtttgaaatcgacaggaattatcaaagatccagtccaggattttatcactatcacctaattatatgcttagtttctttccaacactatatcctgatgaactgttatatagtgctttggctagatatcatatacggagtggcaataaaacctttaagcaaactgatttagaattatttggttacagttctcagcaactatgtaaagttactttaaccaataatttgaattatttagttaaaaacttgtctttattttctcagttaacagttagtgatttactacaaaatcataccctataccctttttatgcaagtttcttaataccccagcaagcttggcaattacaagactctatgaggaaaaagctaggtggctctattttagaggttgcaaaagtagctaatcactctgctgacaactcaacaaagtttttaaagttttgtcctatatgtctagaacaagatacacaggaatatggtgaaccatactggcatcgaattcaccaaatacctggtatattagtttgtgcaacccatagagttgttttgcatgatagctctgtagctgttgattctaagggtatccattattatgcagcgagtccagagaattgtctcaccaatcaaaatcaagtgaaatgcgctgataacactgtagaaaagttattaatcttagctcatgatatttggaatataagtactattaatattccttttaaaggtttaacttggctccgcaatcaatatcagtcctatttaattaatcaaaagtttatgaccctcctacctggggagaaatttagatttaacgaaaaatctttttcaaattctatctgtgatttttatggacaagagtttctagaaataattaatccaaatttaatcaggaatccagacaaatatttttctggttatttactagcttgtgatttgaatccagtaatcgaccggattacacatatattgataataaaatttttagctaattctgtagaaatattttttacataacatacttgttagagtacttaatatataaaaatattttttagcaaaaaatatattaatttacttgaaattgcataccgattaaagatgtagcaatagagtatggtagagaaacaacataaattaagctcagaagtagcgatttttcagagaaatgaaataaatgggtgataattttcacgtatcaactcagagccatgctacagaggttttaaatcctcagttaatctacgtggacttaagctttcgtgtaattggtcagactttacccatagaccacggctatgctttgtatgctgcactgactcacttacaggacaaacttcattctctagatgacctcagcattcaaactattcctggcattcctgatggcaacgattcacttcatcttaataaccactctaggcttcggattcggctaccagtagataaaatacctttagtttatccgtttgcaggtaaatcactaacaattggcaggcataagattcatttagaaattccccaaatgtatcttcttcaagcggtggagaaattgcgatcgcgtattgtggttatcaaaggctacgaagaaccaaagggttttttagcagcagcgcagcgtcaactggaaaaactgggtgtccagggaatagccagtatacctaccaaagctgatggcaaaccagaacgcagaagtatcaaaattaagaaatttacagttgtgggttttggattggaggtaacgaatttaaatgatgaagattcaataaccttgcaaaaatacggtgttggcgggaagcaaaaaatgggttgtggagtttttgtaccagttaacgaaaaacgatagcagttgtttaaaggcagatgataaatacaacagctaactccaaaattcagttaaatctgagcgactctagcactactttgttacatcgcgcagggatagcaggattttggatgacgctaaaacagttggaagaaatatatccgaatcctgctcaacgtactggtaatttaacctgggtactaacaccccatagcatcagtcttaactgggaagggcaggatttcgcagctttagactggttgctaaagcaatcttttcaaattagtgatgagggtttaattttcctgacaggattaaatccaaaagcaattcatattgaaagacaaataataatccatcaaggtattacaggaacttttttacagcacaataaatttttcaaattttcagacaaaaaattaaagtccataattgttgacggcagacaatttgtgactgagtacaaaagtgctatgtcttatgctcatcagcactttgctaaaaagttgtgtgatgaatctggccaattgttacaagagcctattggcatagtaggttggctgtatccaggagcagtagttcgtcattctgcttttccaaaacaaaccaaatttgaagagaagccagagtatgcactagcgttattgtttgtgcctgtagcgtgccactattttattttgcgatcgcacaccaaaccccaatctacaaactatattctggttgtccccgaagtaaataatttagagttttacgcccagcattgctggaatctgagtaatttgagttacagagattttcatgtatctagcttaagagacgctggattaaaattcctgactaatgaagcagcaatacagataaaacaaaattgtgttaagcgatgtcaggttttttcttttgggacgctaatttggtcagaacagcaaaaagttcgtacagaaacagcaacattagagctaacggaaaaagtgagcttctactataagtttagtcggagttgtttctccaattaccgaatcgttgactatgaaaatcaacattttatccttacaagtctagttcaaggaataattgctaataatttaggtttagggttgccttggtggaatgattttggcaacatacttacatctagtaatttgtttaatcaaatagctgatgaaaatcaaggaatttatatgatgattcaagagtctgaatgggacatagaatcgcaaaagctgtttatcaaagcttgtcatgaagcattaaaggtaatatacgccaaaatttattcccgaaccaaggaaaatgaatatgctcaaattgaacgagaaaatacgaaaattatatctcaactaggacgctgtactaatgctgaaaattttagaaaatttattgcggaattctggggcaaagcagggcaactttcaattttagaagaacactgggaagaattactaccaataacaacaggtgttaggcattggaaaatgtccagggatttaacttttattgcaatcgctagctatcccaaaagtaagaacatcaagcctgaatcatcagaaatatctcagacaagtagtgaataattagaattttttctattttcttaaatccatgattttaaatttttaggtaaatactcaatgtctcatctgtttggtaatattttaactatttatggtactgctgctaataatcgaggtgaaaatgaaggtaatattactaccctacaaaaaataaactggaagggcgaagttcacaccagtgtctcagcagaggctattcgttgggcagtgcgctactactggcaaaataatggttatgaagtaaatcgacgttgggatgaaaatgcacaaccactggctgatcatatctggcaagacacgaacttcaatagtgttcggttcattgatgatgatgttttaggattcatgcaggcagaggcagcaagagttgaagcaggtgagcaatctggaggtgaagtccaggaagcatccgcaggagaaattcaaaatgtgtctcaagatgaagagacagcaagcccaaaaggcaagggaaaaaaaacttcgcaacgcaaaggacgagaaagatcacaagggagagttaccgctaaaagaggtgtactagaggttactcgtgcagtatcattgattccctatgggggtaacattacttttaatgcagtcagtggaacaaaaggacgaacttctctttatggtacagaagttcatgctactcgttatcagtatggttttgcaatgacacccaatagtctccaagacaaatctcggatcaatgcagttctagatggcttaatttcaattggagaagtaggaggaaatcatgcccggtttttatatgatttttccccagatagtattatattacgctggacacatgatttctctcctcggtttctctattgctttgaacaagatgaatggggaactatatcagttccagatttagtcagacgggtagaagctgaagatattgacccaaaagaattatggattggaggagcaattgctagagatttaggaaatttgggtgcaaatgtgtttccaggtgtgaagaaagtagtagaagaattattaaaggtcattacacgagacttacaattgccaccaaggagttcataatgtgacgactattgctttgaaagtagaagtccctatcgcttgttttcgccagtctcgtgctagggagtatgtagaaacctattcggtaccaccaccatcaacagtatatggaatgttactgtctcttgtaggggaagaaaacagatatactcactgtggagtcaagctggcgatcacacttgtatctgaaccagcaaaatcaactgtaattcgtacctttcatcgattgaaaacgaagaatattcatgatcctaaaaataataaacctgattaccaggagttactgactaatattgagtttgtagtttgggtagaccctggggtagataaagctagaccaaatttagtgcaacgtttagaagaggcatttactaacccagcttctattaatagatttggtggactatgtttaggtgaaagtcgggatttagtaaatgatattaccctcttaccaaaaaactactatgcagaatcaatgcggtggttaatcaaggatgaacacgggttgctaactttaccttattgggtagaccacgtaggttcgcaaggaacgcgatggctgcgttacgagcttcaggaatgccaagtattgcaaccgcctgaattatcttggacttcagttcaaagtgattagggggttattattttattttgcaagtacctttgcttgagaagtctaaataccatgagcaatagccttgtcttcttatttgacaagccttttagggattttatacgcatccaagatgcttgcgatttcctggaacaccgtcaacacaagagttgagggctttaacaactttccttgtgctatgaatagctattaatttttgcaactggactaatcttcagtgatagatgcttgtaaaattgaactagagcttaggcgagtcaacaagtttggcgatcgccgtgcttcaacattagatgccattaggcgttgagcaggcatcgtgcggggtgagaattgggtttacgaaaatgtgcttcaacattagatgccattaggcgttgagcaggtagttagtaataattaattctttgcccttttttacttgtgcttcaacattagatgccattaggcgttgagcagagtctagatattgcaacattaacattctgagggttctgtgcttcaacattagatgccattaggcgttgagcaggaagattttaattatcgccatgtcggggaaatagaagtgcttcaacattatcagatgctgttaggtgttgagcaaaaaaataggctcaagtatttgcgcttaatataaatacgttctcactgagtacaaaactagtcatcttgagtctcgtctttccgagaaattttagcgataattttttcccattcctcaatttgcttctgtatttgtaatttgcgatcgctcaactctttattatcattaacagacaaatcctgaccactcaatcgctcacggtaaagagcaatcagttcggttagggcttttttattgcgtgcttatcctcctgagtcagagaactcacattgactggaatcagctttctgcctattctctccacaaattcagaccgacttaaatccatgctgtcggcgatcgcatctaatccatcaatcccggtaggagttagggctaggttaactcgtttcttcacctcatcgtacagttctggtacgtctttttgacctttttgccctttcttacccattgccgtctactttttacattcctcccaatcatagtaaacacattcaacactttaagctaaacattaaaactgtttctaatctttaggtattgtgtaatgcctaatttagctagataatttaggtattgtgtaatgcctgaataggcatcttgtaggaatatgagtaactaatttcaccgtttggcttatcaacatctaaacggcttaattttcatgggcaatccttaattgctgcttatctaattcaaattaataaaaatctgctaaataattcggtcatttttcacaactatatggtgagttttttccctaaaccttatccagaggaaattttatatagtgtcattgctcgttatcacattagaagtggcaataccagtccaaaaattacacttcaagagttatttaattcacaaactactgtagcaacagtagatttaccatcgaacctgaataatttaattcaaaatctacaatttatttcaaattaccaagttgaggatttgatatataaacatactctctaccctttatatagccctttcttgtctgcaaacaggtctagtcaggttttggaatctatgaaaggagattacggaggagatattcatacaagagccggaattatggcaagctcaattactatgccaaagtattttcggttttgtccaacttgcctagaagaagacctaaaaacttatggcgaaccttactggcatcgcatccatcaaataccaggggttttagtttgtccatttcatgctgaagttttgcaaaatagtctagttcccttacacggttttaataagcatgaatatcatgcagctagtacagacaactgttctattactaaagaatcaactttttttagcactgacatactgaaaaaactactgttattagccaaagacttttggtggttactcaatagtgaaataccttgccaagaaccacagtggtttcgcaaacaatataccaatctgatgattgagcagcgtcttgcaactgcaacaggtcgaatttatcagaaaagactactggataattttttgtttttttatggtcgagaaatgctcagtgccgttgattcaatggtaaatcataatgactcaaacaattgggttactagcattgtcaggaagcataggaaatctttccatcctcttaggcatttactgataatcagttttttgaaaacgtcagtagaggaatttttcaagcaagatactgaatacaagccttttggcgaatctccttggttgtgtctcaatgctgccgcagaacattatctacaaccagtgattaccagtttagacattactttatgctgcgatacaaaaaagcctgtcggtactttttcttgttcttgtggaatgatttattgccggactgggcctgatgaaacagatgaagacaaacttcgcattggtaaaattaaaacatttggtcaactatgggagcaaaagctgaaagagttagtagaagttgaaaagttgggtttgcgggagacagccagaagattaaatgttgatgctagaactatcaaacgttatgtatctcgtctgagactgacaacttattggcagactagaaaggaaaatgactctgtaggcttacaggaattaccagaaatagatcccaattttgcaactgaactcaaattgaaacacaggcaaaattggatggttttacaagtacagaaccctgaagcttcaaagacaactctgagaaaactagcaccagccacctatatttggctatacaggaatgacagagaatggctcaatcaaaactcacccgctttacaagttgctgttccttccgttgtgagagttgattggcatgagcgagatcagcaaattctcactcaggttcaagatgcagtgcgatcgctacttaacgctgagataccagagaaaatttctattagtagggtagggaaaactatcggcttacttgcattactcgaaaaacatctcgaccaaatgcctctaacaaaggcttacttagaatcagtagttgaaacggtagaagaatttcaaatgcgccggatcaagtgggcaatcaagttgcttgatgaatgtggagaagaaattatgcgctggaaggtagtcagagttgctgctttgcgagaggattgctctgaaagggtcagtgcatttctggaaagtgaacttgagaaagcatacaagaaagagaggtgattcaattcacctctccaagtgatgggataaatgctttgtgtgttaggccgcgtcggctaccagtaagccattcatagcgatgatgatgatttgtgctgctaaaggagtatcacaacgtggtctatcgtcgctattacagggttgtgctacccatttaccctccagattttggtagaaagtgccgagaagttgataaccattccaaacacggtaaagctccccaaatacttcagataccgaatcaatctcaatttctggtgctactgggtcagcaagctggtcaatatattcctcaaactctaattgagctaaggcttggttatcaaattcatcttgtacaatcatcatgagtaacctcattaatggggttgaacaaaaagcgatcgcatttctcttggcggagggcgatcgcctttttgatatcatcccacaatatggctactttagtagctaaataataacaaatgtatctaaagctttaatttgtcacttcgactgtgcttaaaaaattgcttaccgatatttccaatgcagtacatatagcttctaatacttttagggaaacactttcagactcaccatattctaattttttcaagttttgatgggaacattcaccacctctagcagcaatttcatcagctagtttctgacgtgattttttaccacgcaatcgctttaaaatgattcctctgtcttgattccagacgacagatacaacatctgcaacataaatatacgtttttgtttctttttcacccttattgcccatatagtagctacaacagtaaacaatacataaattttgagctactatagtttacaaattattaggatttaggtatctcaaaacgaagttgcgcccggtcttcaggatgagagcgttatcatccaagaagatacacaatgcaggttttgctaagagaatgtgtcatagccaatattatgagtaatcgcggattccttaaagaggtagcaaacaaatatatattaggctgattatgttaatttgctaaaaatgttcagttcttaaaaataactgaacgtttttatctaagtataagtacgagcttattttattagtagattattaaattaataaattaataaattaaataattacttgggctatgacaccgtataaacacggttttaaaatcaaaataaggatttaaagaagaaatatctataaaagtatttgcggcaaaatgtggcggttaagagtatatgcaaatacaataacttgaatatgttttcctactattatttgtcataagtgtatcctttatggcgcaaaccatagtaatacccacgggcattcctatcataacccttcgcctccaggtacttgtattggctttgggggaagtttcaacatggtggcgaactcaatatttttctgctgctggactgagatttttagaaagaatctacccacgtacagcttttgccgcagctatcaatgctgctagtacggcagctcgtcctgttcacgacgctagtactggcagtaaccaaatctaccatctgtttcgccttcctatttccatagagcgggaagttcaactattactaacaaaggcacaaggagcaagtttggcgttagaagtcaaaccagcacttggggataaagacaagttgatgacaatgttagatgcactaactacagaaaaatctaaggtagcggttggtgcattacgtttaggaagcagtgcagaggcataccaactagcaacctacaaacggatggcaggagcatatctaagaggttttcaaacaggcgatcgcgtctttccctacatggaggcagaccaggagtgattgttatgacatcgggtgacgcagtgcaaaagtcacctcgttacagtattgcgattgtctgtaagggaactgcaatggtgaacgagactcgccatttaattcaacagtggcatcctacagaaaatgtggatacatttgttaaacgcgttcaagctgaggatctgctgggacgacaaacagcccagcgagcaaaggacattgcccgaaaagtctttgcagcacgctttttgctaccaaacaacaaacctgctcgactccttaaacaaattgttgaggctggtcttccccataaaacttttgtagaaatactatttttatttgcgtgtcgtgctgataatttattgtatgattttacgctaaatatttactgggcagcagtagcacaaagacgaaagaaaattttcactcaagacgttttagacttcttcgagtcagctgctgttgatggacgaattctctctccttggtctgagggaacgcaggtgcggacagctaggggattgttagcgacgttgcgtgatgttggttttttacgcgatgttagtcatggtaaatcggagcgagagattattccctactacatatctgatgaaggtgtagcttgccttgcacgctatctccatgaatcaggaatttctaactcagctttgtgtgaacaccaagactggaatatttttggtctcaaccgtgaacaagtgtgcgatcgcctagatcaacttggagaacaccgtggattaatcatacaaaaagctgggtcagtagtcagcatcacttggaaggtcaactctatggaggaacttattaatgtcctctctcgatgaaacttttgaattacttttacaaaagctagaccgcccagacaccctcaatgctgctaaaagtgacccaattttttacttcgtttacaaacccgaagatatgctcaccctaaagcagcgtttatcgctttggaaagctaaattaagggagttgaaatttgatgttgaaagaatatcgctctccgaccttttgtggcagattattgacgaatcagggcggtgggaagactggctagaaattgaaccttcagcagaggttgaggagttaaatcaagccattcgtgatgttttaactagtcagagtcgtctaattgaagaggtggcacaacgaattaattctttgatgcctcccaaaattgtttttttaactgaagtcgagatgctgcatccttatctacgctctcggactctagaaaacaagcttcatgatcgcgtgccagtaccattgataattttttatccaggttatcgggcgggacagtacggtctacgctttttaggtttccacgcagaagacagtaactatcgctcgataatcgtcggaggcatttgatggcaacaattcaatctcttttttccagcagtagacctattgaccgacagattgaaaaggtcatcgattattctgcacaggatgaagacagactagctacagaaatttcagaatatgagattaccgataatattgagcgatgttatcggaggtttctggatgtattttcggaaggagttcgtggtggacgcgtaactgagactggaatatgggtgtctgggttctatggttctggcaagagttcttttacaaaatatttgggatttgcattagaaggagagagaaaaaaagtacgtggcaagccatttctggaacttttatctgagcgctttgttaatcgcaatactatccaagccgaactactaactctagttagacaacattccactgttgtcattttccttgatttaggttctgaacaactttctgaaagtgctgccacgactgtttccacagtcctttattggaaagtattgcagtgggcaggtttttctaaagaaaagaaactagcacaactggagttaactttagaacgtcaaggaaaatatgctgaatttcagcagctatatcgagatacgtataacaaagaatgggaagaaattcacaatgatcccttactaggggttagtcgcgctgcggaaattgtcactcaagtattacctaaagaatttcctacaagtaaaaactttcgagaattgagatttgatctggctgataatttgcgcgatcgcaccagtgaaattattgatttagtgcgacagcgaaccaaatgtgaaaatatcttatttttactcgatgaagcgggtcaatacgttgctcctcgtggggaattgattcttaacttagatggaatggctcgtaatttcaaagagttaggtgaaggaaaagtctggataattgccacaggtcagcaaaccctgaatgaaattgtcgaaaaagctgcctataactctgctgaactgaacaagctgaaagacagattcccaatctctattcaccttgatgctagcgacattagagaaattacttatcggcgattattgacaaagccgcctgataaagaacaattattaaaagatttatttgctacccacggtcaagcggttttaacacacacacgactaactgaaacagtactttataagaatgatccgaacgctaccacctttgctcaactttatcccttcctgccccagcactttgatttgctgctggagttgattcgcaccctggctcggtcaacagggggtgttggcttacgttcagccattcgtgtgattcaagatgttctcattgacaaaagccgtgttttgccagcaaacactcttaaattagcagaacgtcctataggtgttttggcttgtgtggatgacttctacaacactttgcgcgaagacatcaacaaagtatatcctcacgttgtgagtggggcagataaagttgtcagaatttttcctaatgatgagatcgcccatagggtagctaaagctgtagctgctttacagccgattgatacctttccgcgcacagcagaaaatattgctgctcttctttacccagaattgggttcgctttctttattcgatgaggttcaacaagcactcaagagaattttaaatgagaaggagtgcggtttaattgaagaccctcaagcaggtggttatgtttttctcagtgaatctgttagacctttgcgagataagcgaacttcctacatccctacgtctaacgaatgctctcgcattaaagaagatattgttaagcaaatttttcgggatcaaccatccacaagacttgacaatattaaggaagtaaaagccattgtcaaactagagcataagctagtcgttggtcgggatgaaaccatcgatttcaaattagaattcgttgatgctggcggattctccaatcgccgtactgaattgatggcagaaacaaacagtcggcgagaattgaaaaactctattgtttggttggcaaaatcagacaacacagtagatgaactactgcaagaaattgctcgttctgagtgggtagttagagaaattgatgagcgagcagatgataaaggagatgtggcacagtttttgcgagcagagcggcgttcaggcgatcgcaaccgagacgaagtagcgaaaaaaattgagcgcttgctgatggaaggaactttgattttccgaggaaaacctacaccagttagtgaggcaggacagactctaaacgctggagcgcagacggttctcgcaaatgcagcaaaagaagtgtttcatctacacaatctcgcagctattcgaccagcaacggatgttgctgctaagtttttgggcgtagagcgtttagatcgcattacagagcaacttgatcctttgcgtttagtgactaaaaaagctagcaatactcgtgttaatgtcaaccattcagctttggcggaagtgctgcgagtgttccgggcaaaagtagatgagtctggttcaggtcgcttgcaaggaaatttcctacaagattttttctcggcagatccttatggctggactaaggatacagtccgttacttatttgctgcactattgacagctggtgaaattgaattacattaccccaaagctgatggcccactgcggacaccggggcctttagccgtggaggcaatgaaaaatactatggaatttagccgggtgggagtttcattgcgggatagcaaaccttccattgaagctttggagcgggctgcacagcgtttagaagagctttttgctgtggaagttgtaccgttggaagacaatatcagccgtgcagtacaaaaacagatgccagagttattagaacaaattgcagacttacctgttcgtctacgtcttttggatctgcggggagaacaaaaggcaaaagaactgcaagcaagtttaacggatatcctcagaggcgatgctagcaatgcaacagcacttttaggtagtcaaaattgcacaattcctgacgatatccaatgggcaaagcaaattgttaatttactcaacaatggcgctgaaagagaattcaaagtagcacgatcgttactcaataacttagatgaacttaaggatttattttccaagcaggtgctagaactgtcatctcaaggtaatcgagaagctatttacaatgtttttcactcagaacggtttcaagaacatctaccagagttgcggcgagcagttcgagaattgacggggcaattagaagaacgctacacaactgaggttgcagagtataaacaagacttacaaaaagccttaaacggcttggagctagagccagaatggttaaaactaactgacgagcagcgaaataatattgccgatcgcttgcagatggatgttgccgaacaaattgacggacagaatccagtgcgatcgctccaggtgattctcacccgccgtttaggtctaactggagtagttgataatttacggcggcagatacaacaatcagtgccacatgaggcggaatcaacaaatgggctagcaggtacttactctgtagaaaatctacatgaaacagaaagagtgaatacacctactggtgaatacactgtagaaacagcaattgatgcagccgaatttgtcatgccagtacttatagaaaattctgagcaactggatacttggttagcttccataagaggaaaactactagaaattttgaatttacgtaagcgtatacgcattaagggataaatatgagctttgatcgagaaaccctcaacgccttagctagaatggttgcagcgtgtaggcggcgactgacggaagatgtagaaaatcaactccagcagactttcgggttgtatgtagatggcacaattcttcccttatcccaattgacccatctgacagaggagcaaaaggttgcagcgcaagcattacgtgaactgctaaaccacttcaaagccagcgacccacaaaaaagctatcaatctgcttacaatcgcacaattctggaaatctcctttaccatcctcaaccgtttggcagctttgcgcttgtgtgaggagcggaatttagtaattgaatgcgtccgcaaaggaatggagtctgacgggtttcgcttgtttgaaagacttgccaatggcagtttggggagtcgttacgaaacctatcgggtgtttgtggagtccatgtttgacgagttggcggtggatttgggagtactatttgaccgcactactccacagtcaacgatttttccgagcgatcgcgtcttaacagaagtcttcgatttgctcaatgatgtcacactgcaacttgtctggactgaagatgaaacaataggctggatttaccaatacttcaatccacctgaagaacggcgagcaatgcgggaagcgtcccaagcaccccgcaatagtcgggaattagctgttcgcaaccagttttttactccacgttatgttgttgagtttcttacagaaaatacccttggtcgcctctggtatgagatgcgtcaaggagaaactcgaatcaaagatgaatgccagtattttgtcgaaaattctgagcaattcttagccagggatcgtaaagacccccgtgatatcaaagggctagatccggcaagcggtagcggtcattttctcctttacgcttatgacttatttgaggtgatttatcaggaagcatgggaagatgaaaattccccgccctcagaatttacgggtcgaaagttgcgagaagattacccaactttagaagagttgcacagacagttacctgtattaattcttaagtacaatttgcatggtattgacattgatgcccgtgcttgtcaaattgccgctcttgctttgtggctacgcgctcaacgttattaccaatcgctaaatattaaactaagtgaacgtccacccatacaaaaaattaatattatctgcgctgaacccatgcctggggaagaagaattactcgcagaatttatcgatgagttgaatcagaaacgtccaccaattattggtgaattggtaagaaaagtttttgaaaagatgaatttagccggagaaactggagcattacttaaaattgaagaagaaattagagatgagattacacaagctaaaacacaatggctagctgaatataacccagagcaaccaactctattttcattaggagaatattcagatgttaaccaattaagtttatttaagttcgccggaattaccgatgagcagttctggactcaagttgaagactgggttatagaagagcttcagaactatgctaatcgagcaacgacagggcaagttttccagcgtcagctattttctgacgatgcgctacagggatttgcctttgtggatatctgccgtaagcagttcgattttatattaatgaatcccccatttggtgaggtaagtattccttcaaaagaatatattgaagaagtttatgaagataccaagggtaatgtttatcaaacctttgttgaatgtttccaagacaggctagtagcaggaggattcttaggggttatttctagcagaacaggctttttcttggcgcaatcaagcgattggcgtaaaagaatattactgcgtttgtatcgtccgttattgttagccgatttaggttatggtgttttggaagcgatggtggaaacagcagcctatgttctacgtagtattacaatagaagaagataaaaacttaacattaaatcttgttccacaactattagaaattcctgtagatagacagagatgttttagcattcccaaatatcagaaacatcgaggcggcttaaagcggcatcaggctaatcaagaattaaaaaaactgcacgaaaatggttatatatcattgacactaggtcgttttattcgctataaagctaattttgcaaaaattcaacagtctgatattcctagttatttagcatatcctaatttaatttgttttcgactgttggaggaaggagataaaaaaagtgccttaatagatattttacaaaattacaatgactctagatattttgtagtttcgccagaaagtttttcaatggttcctaatacaccattttgttattgggtaagtaataatattcgccagttatttactaaactgccgcaatttgaaagtaatggtagaatcgctcaacacggagcatcaacaaaaaaagatccacgatttctacgtctttggtgggaaatactacctaataaaatagtaactggtacggtagaaacaacaccagaacagttttgtcaacaaacttttgaggataagccttgggtcttatttgctaaaggtggagcttattctccatattatgcagacttacatttgctaataaattggaagaataatggcgaggaaattgaacaatatgttttatacaaatatccatatctaggcagaagtggtgcagattggattctacatagggagtgtaattatttccaagcaggcttaacatggactactcggactactagcaagattagttttcggaatttgcctgcgggtagcatatttagtagtaaaggagcagcagcttttactaaccatgaaatgtattggttggctattttacaatcgtctatctctgaagctttaattagtttgcagcttgcagcagtagatgcagcagcccgctcttatgaagtaggtttaattcaacgtacacctgttcctcctaatagttctgatttccataaggaaatattagtaaaattagcagatttttgtattggtattaaacgctctttagatacagtaaatgaacatagccacatatttcatatacctgctctgcttcaagcattaggtaataacttaactgataagatttttaattgggaagataatattaataaatccactaaacgattaagtaagtatcaagaacaaattgatgatgtcgtcttccaactttacggaatatcaaaaacagagaagaaaagtcttgaaataaatattaaaaacaaaaatataagaattgaagataatactgaagatatagacgaagaagatgaaactgcactagcagcagacgcaaaacagctagttactgatttactttcttatacactcggttgctcttttggtcgttgggatatccgcttttctacaggcgataaatcagcaccagaacttcccgacccctttgcaccattaccagcctgttcaccgggaatgcttattggtactgatggtttaccagtttcagaaactccgccaggatatcccattcccattgcttgggatggcattttagtagatgaccccaatcaccccaacgacatcacccgtcgtgtccgtgaagttttagaaattatatggaagaacaacgccaataaaattgaacaggaagcttgcgaaattcttagtgtgtgtgaactgcgggattacttccaacgtcctacaaacttctttcaaaaacatctcaaatgctataccaaaagtaaacgcaaagcaccaatttactggtcactttctacaacatctagttcttacacagtctggatttattaccaccgccttacagaccaaacgctctacacaatcgtcaaccgctaccttgaaccaaaaattgccgaggttgagcgtatcactggtggcttagaaaaagaattagagacaaaatcgggacgggaagcttcacaagtacgcgataacttacacgcaacacgcaaattcctcagtgaattgcaagatatgaagcaggaacttttgcgcgtcgcacagctaccttacaaacccaatctcaatgatggcgcaattatcactgccgcccctctacaccgtttatttgctttgcgacagtgggcgcaagaaaccaagaaatgttgggaaagtttggaaaaaggcgaatacgattgggcgcatttagcctacacaatttggacagacagagtgcgggaagtctgcaaaagggataaatcaattgcgatcgcccacggacttgaagaagtttaccaagcagctaacccagaaaattcccaacccaaaacaaccaaaggcagaagccgtaaaaagacgacacaggagtcagtataatgagcgtctcagactttgtttgccgacaattacaccaaagattagaacagcaccgtattgtcgtttggtacgatggcaatcgcgcttttgctgattttattcaatccttccaagctgactcctgtgtagtcgtatctgctgttgagtctattttgaactcccgtcgtcaagccgaagccgtctaccgccagatgaacgagtctaataactcagccaaagctgggttgaatctcctcatttacgtaccccgccagcgcggaacaatagaagatgagaagcggcaagatccgtttgaagttttcgcatgggctggtgtggcgtttggcgacaaagaagcagaacagttagaatctcttgctagacaagcaatgccagaacgggctatagaaattactcggctatttgcccaaggcagtccaacgctatcgatgttggataaattacagttccatcaccgttcgcctttactgttagaggcgctaggtactgactcaccatcagaagcgatagccttagtcctctgcttagaggagaaatcacaacgaattgattctgttaaaggttgtttaaaagaatttttgccgttattggcaacggagattggttttaaacctgcatccaaagctaaatcatggacagaaattagaaagcaactcattcagtatgtgctgtttagcgaatttgccctcgacctgccttgtgacctgccagagtcattaagtaccttacccagagccaaagccagccatgaattagtgatttttgcagtgtgcgatcgcatgagggatagttccgacttgcgatcgggctatgttcagctagcagtagaagtagaaaaccagttgcaccttggcaatctcacagaaaatatagctcaactaggtactagagataccttcccctttgcagaaaagcgatacctacagcaagtgctggagtatgtgcaacagaataacttagcagatgcccagaagattttaacccaacgccgtcattccatctggaacaaccacttggaacgaggtaatatttggatgatagtagagcgttgtgtgacatttctcgccacaagtaatgctgtagaagagttgtcaaaaaaatctttacagtcaatgtctttacgccaaatcatctctgcatacgcacctccagatcgctggggatgggcagaactagaccgacatcagcgactatttgaacagggtgcaaccgcctatgcaggagatgagggagagatagaatctttagtcgaattttgccgccgacgttacttagaagtggcattagcaattcaagactgcttccttaaatgtgttcagaaagaaggttggtttcccgaaggagtgctgcgataaacccaaatatttgaccagtatgtagctcctctactggaacagaacaacaaaaaagtcgcattttttctagttgattccctgcgcttcgagatgggacgagatttggcagaagctttagaacagttgggcgaagtcgagattttaccagtcgcatctgttttacctacaactacaccttgcgggatggcagcactgatgcctaatgctgatggtacgctcagactggtggaatcaggcggagagctaattcctgtcttaggtgaaaggaaactggaagagtccaagcaccggatgcgactgctacaggaaaaatacggcgatcgcttcaaagatatcgaaccggaagatattttcagcaaaaaggtaaatgccttgggtaagcagttagcctctgtggatttattagttgtccgcaccaaagaccctgaccgcattgctgaaagtattggcaacatgaaagcccgaaaatatctttcggatatagtcgctgaaatggtaaatacaattcgtcgattatctacaattgggttcacccattttgtcattagtgcagatcatggtcacgtcctaattgacgaaataccattaggagatgtaattcccaaaccagggggtgagtggttgaaaactaagcgcaggagtttgcttgggcaatttatatcgggcgaatcttcaagtgtagttatcttcaaaactgagcaggttggtatccaaggcgatgcccaagacctctgtgttgctaaaggctttaaagttttccaacaagttgaaggttacttccacgaaggcataagcttgcaggaagcgatcgtgccattggtaattttgcgatcgcaaggtaagattactgctcagagtaagccaaatattttcctgcgttataagtacgattactttaccaataaagtcattaatctgcgagtctgctatgaatatttgctaccagaagcaatacaagtccgcattgaagcttacgatggctcaacagcaaaagccaagcgggtaggtaaagcaaccgactgtgatgctagagacgaacgaactggtgaaatcatactccagcccaatcaagaaacttcggttcctatcttactggagtctgacgacatttcatgctccaaaattgaaatacgagtaattgacccacaaactggcgtaatttgggcaaagttagaactggaaaatcgcttactagattaagaatgaactcatgtttcaagatgccttagaccaaaaagttaatcaaacatttccaggaaaggtagtacgtaaggacttgctacatcaaatcaagggtggagaaaatgtaccatcttatgtactggaatatcttctgggaaagtactgcgcctcagatgatgaagatgaaatccgcattggtattcaggctgtcaaagaaacactacaaagcaactacttccgccacgatgaagctaacaaagcccaagcgctagtagaacaacggggacgacatcgatttatagaccgtatagaagttcgttatctcgccagtgaaaacaaatattgggcggcaatggatcactttagttactccagaattcatgttgctgaccgattttatcgacaatacgaacgacttttagaaggtggaatttggggtcttgtagatgttgaatttcaaccaactgaagaagaaggtgctaaagccagtccctttcacattgctgacttaagaccaattcagttagcaagatttaacgttgatgaatatgcagaaggtcgtcgcagcttcagccgcgatcaatggattgatattttgctgcggagtgtgggtttagaacctacccaaatagaacaacgtttaaaactgctgttactgactcggttcattccctttgtcgaaaaaaattataacttcattgagctagggccacgaggaacaggtaaatcctatgcctacagtgagatgtcgccttacagcatcctcatttctggtggtaaagccagcactgcaaaccttttctacaacaatgcccgccgtcaggtaggtttagtaggtcattgggatgttgttgcttttgatgaagtcggtggtttgaaagttaccgatgcggatgcaattcagattatgaaagattacatggctaacggtcgtttcagtcgtggaatcacccaagttttagctgacgcgtctttggtatttgttggtaatcttaaccaacctgttgaaactctagtccaaaatactgcaacagacttatttcagccattaccaaaagaatttgatctggctttacttgaccggatgcacttctacttgccaggatgggaagtgccaaaaaactccaaaaatctgcttacagaacactatggttttgtcactgattatttggctgaagcgtttcgtaccctaagaaaacaaaatcggtttgatgaagtcgagaaagtcttccgttttggttctcatgtagaaggacgagatgcgatcgctgtcaaaaaaaccgttagcggattacttaagattatccatccagacggagaatggacaaaggaaaacctgacagaatatgtagaactagccttagaagggcgcagacgagttaaagaacaactcaaaaagcgaggttctttcgagttttataaaaccagtttttcttacatcgaccaggaaaccgaagcagagatgacagtgggtgtaccagaacaaggtagtgctggaattatctctcaagaacccttacccccaggcacagtgtacaccgccacagcagatggagaagcaagggttggtcttttccgcttggaagtagcttgtacatcggggacaggaaaattgcgaacccctacaggacttgacaaagctttgaaagaatcattaaaccgcgcttacagctatcttcaaagtataaaggaaagaaaaggactcaatgaaactttgggattgaaagatatttacgctgaagctgtggacttgtctggaagtcgtgttgaatgtccttgtggtgtagcattttttgtcgccatcatttcagccatacagaatcgtcaaatccaagctggaactcttatcttgggcgatttaacgattcaagggaatatcaaaggccctgcttcaattgttgaatcattacaaatagcaatggaaagtggagctttacgagctttagtaccactttctaataaaagccagtttgcaggtttaccagaagagatagtcgaaaagctggatattgtgttttacggtgatgttgaccgagcagtaattaagagcgtcgaaatttaagagactatccctattatgtcactctcgaaaaacaataattgaaacaagattctaaacctttgatttaattaagcttcagcctttattttctaacaataactaaatttatagccaaaatcagaaaattaaagccctgaaagctttccagcgattcggttctcctaaaatgacacaacagggctatttataaaataaatctttaggctacaagacgacttagcataatcctactttgagaaacctttaatgtagctgatgagatgttgatctatattgtcgatatcacctttaagctactgaaaatcgagttctgaacggttatgaaatgcgattgctcgtgaccttgtagatgcagttcaccgcaattttgctatcgactggccacagaaataactttttaaaactaacctctgccgattagcgtgtgaggtcgagaattttgttgtgcgatcgcctcactacgaacaaatgctaacttttttacacccctttaaatttgcttgtttctagtatcgctgtttctacgatttttttgagattaatagcacctccaattacagtagaaatactgtgaatttagcttttattgacttggtacttagctaaaatactattcttctattggagtattgaggagcgctcgcgcaataggaaaagcaagacacaatatttatttataaaaaggaaataattcagcttaaaggtttcttaatggaacctgacgggaactttcaatctttcatcaacgtgattatagtaagctcaacagtaaatatacgatttatagttatttagttattgttaaccttcaagccatctaagctaaattacggatgattaacccccagctagacaaaactattgagcgttatgagacggaaattgagagactgaaagtgactgacacggccatagatgccgaacaagttttggaagtgttaagtgccagggatgctgtgcagttagccttaaagggtgcaacattcattcctagcagtaggctaaagcaggttctagagttagatgcagaactcaggaaacaagcagtacacattaacaaagttatcaaagctgaacaattcgcccagtggcgagaaagtacacatcctcctgctgaagcttggtggtggcggttagaaaatcttacccctcaccataagtgggatagatttgattggttgtggaagggtctagtagttgctggctggactgctaacctcagtttattaatcaatattgctactcgctttttgagcgggggagcaggattattgggagcttctgcggttattttgccgagtattctggcattgctacaggcaagtagtgaactaactcaagcaggtaaacaagaatttgacaaattactcacaaaactgaatatcccccagcacttacacgaagaagctaagttcggatcaactttattaatgacaatctttttacttggtttttggttggctctaccgtcaatttcccaactctacaaccgtcaaggactcagtaattacctacagggaaaattaggagcagcagaacaagactaccttaaagcaatttccttggatgccgataatgcagatgctcattataatcttggcaatctttacgaggatttacaagattttgagaaagcacggaagcattatcaaatcgcagtgggaagtgacgttcctgatgcttacaataatctagctcgcttatacatccaggataaaaaatattcccaggctagagctttgctacaaaatggactagtaaaagctaaagaccttcccgaagtcagatacagcctgtttaaaaatttaggatgggtaaggtttgagcaaggcagatatgaagaagcacaactaaacttacaagcagcaattggtattgcaaataacccagaggtagcaaagaatatccaaaatactggtgcggcgtattgtatcttagcgcaggtaatggagcggcaaaaacaaccggccgctttggagcaatggcagaagtgctgtgaacaaggttctactctcaatgctgatgaagacacatggttgcatctagctcggcaaaaattacaaaaggcaggaagagtatgcaaatagaccggaaaaagattagtttcttagccattgtactaagcctaccttttatgacggtagcaacacctgggctgagtcaacagaatagtctaaattttatctccgaagttaagggagatgtcaaaattcaacgttctggacgcaagaaccatcaaaaagcatatggtggtgaactactagattcttctgattctttgcgattgggaaaaggtgcttctacaaaagttgtatgtaataacttatccatttggaatattaaatctccagggaaattttcagtctctagtggttgtccatccactggaaaaccagttcttataagaaatggtagtgaacgcgctccgactcgcgctcccaatgacccgacaattccctacatcattagtccgcgtgatacagcaattttgagtggcaaacctactctgcgttggaatgctgttaagggtgcaaccagctataaggtgacgttacgcggccctggtgttaattggacaactaatgtgaagcagtcagaagttgtttattctggtcaagaacctctacagccaggttttcgttatcgggtagttgtgactgctgataatggagcaacttctgagagtgatgcacctgttggattcaatttactgagtgagggggaggctcaacaggtaaaagctgaaattacacaattacaaaagcaaccgctaactgatgaatctaaaaatcttgctttggcatatttgtaccaaagcaagaatttaaatgctgtggcaattgatttattagcaggcttagttaagcaagaaaaccaaagcacagcagtttatcagcttttaggtagcctctaccaacaggtaggtttacatcgattagctaaagaacattacttaactgcgctcaagttagctaagacaaacaaaagtctggaagcgcaagcaatcatccaaaccagcttaggagaaattgatatagttcttgacaacttgcagcaggcgtttgagtcattgcaagctgctcaaaataactatcgtgccttgggagatgagcaacaagtacagcaactacagcagaaactagatgacttgaaaggaaggctaccatcatgaataacctgcgaactagacaattagtaaccctaacaattttggtagcaacagctggattatgggtgttaatgccaaagcccacaattgggcaatcaacccctcctgtttctgctgctcagtctgcggaattggcggaagtagaaagactcaatcaacaggtgattcaactttatgaaaaaggcaaatatagtgaagcaattcccttagcagagcgtgcattggctatccgtaagcaaaaactaggcgatgagcatccggatgtggcaagnnnnnnnnnnnnnnnnnnnnnnnnnnnnnnnnnnnnnnnnnnnnnnnnnnnnnnnnnnnnnnnnnnnnnnnnnnnnnnnnnnnnnnnnnnnnnnnnnnnnnnnnnnnnnnnnnnnnnnnnnnnnnnnnnnnnnnnnnnnnnnnnnnnnnnnnnnnnnnnnnnnnnnnnnnnnnnnnnnnnnnnnnnnnnnnnnnnnnnnnnnnnnnnnnnnnnnnnnnnnnnnnnnnnnnnnnnnnnnnnnnnnnnnnnnnnnnnnnnnnnnnnnnnnnnnnnnnnnnnnnnnnnnnnnnnnnnnnnnnnnnnnnnnnnnnnnnnnnnnnnnnnnnnnnnnnnnnnnnnnnnnnnnnnnnnnnnnnnnnnnnnnnnnnnnnnnnnnnnnnnnnnnnnnnnnnnnnnnnnnnnnnnnnnnnnnnnnnnnnnnnnnnnnnnnnnnnnnnnnnnnnnnnnnnnnnnnnnnnnnnnnnnnnnnnnnnnnnnnnnnnnnnnnnnnnnnnnnnnnnnnnnnnnnnnnnnnnnnnnnnnnnnnnnnnnnnnnnnnnnnnnnnnnnnnnnnnnnnnnnnnnnnnnnnnnnnnnnnnnnnnnnnnnnnnnnnnnnnnnnnnnnnnnnnnnnnnnnnnnnnnnnnnnnnnnnnnnnnnnnnnnnnnnnnnnnnnnnnnnnnnnnnnnnnnnnnnnnnnnnnnnnnnnnnnnnnnnnnnnnnnnnnnnnnnnnnnnnnnnnnnnnnnnnnnnnnnnnnnnnnnnnnnnnnnnnnnnnnnnnnnnnnnnnnnnnnnnnnnnnnnnnnnnnnnnnnnnnnnnnnnnnnnnnnnnnnnnnnnnnnnnnnnnnnnnnnnnnnnnnnnnnnnnnnnnnnnnnnnnnnnnnnnnnnnnnnnnnnnnnnnnnnnnnnnnnnnnnnnnnnnnnnnnnnnnnnnnnnnnnnnnnnnnnnnnnnnnnnnnnnnnnnnnnnnnnnnnnnnnnnnnnnnnnnnnnnnnnnnnnnnnnnnnnnnnnnnnnnnnnnnnnnnnnnnnnnnnnnnnnnnnnnnnnnnnnnnnnnnnnnnnnnnnnnnnnnnnnnnnnnnnnnnnnnnnnnnnnnnnnnnnnnnnnnnnnnnnnnnnnnnnnnnnnnnnnnnnnnnnnnnnnnnnnnnnnnnnnnnnnnnnnnnnnnnnnnnnnnnnnnnnnnnnnnnnnnnnnnnnnnnnnnnnnnnnnnnnnnnnnnnnnnnnnnnnnnnnnnnnnnnnnnnnnnnnnnnnnnnnnnnnnnnnnnnnnnnnnnnnnnnnnnnnnnnnnnnnnnnnnnnnnnnnnnnnnnnnnnnnnnnnnnnnnnnnnnnnnnnnnnnnnnnnnnnnnnnnnnnnnnnnnnnnnnnnnnnnnnnnnnnnnnnnnnnnnnnnnnnnnnnnnnnnnnnnnnnnnnnnnnnnnnnnnnnnnnnnnnnnnnnnnnnnnnnnnnnnnnnnnnnnnnnnnnnnnnnnnnnnnnnnnnnnnnnnnnnnnnnnnnnnnnnnnnnnnnnnnnnnnnnnnnnnnnnnnnnnnnnnnnnnnnnnnnnnnnnnnnnnnnnnnnnnnnnnnnnnnnnnnnnnnnnnnnnnnnnnnnnnnnnnnnnnnnnnnnnnnnnnnnnnnnnnnnnnnnnnnnnnnnnnnnnnnnnnnnnnnnnnnnnnnnnnnnnnnnnnnnnnnnnnnnnnnnnnnnnnnnnnnnnnnnnnnnnnnnnnnnnnnnnnnnnnnnnnnnnnnnnnnnnnnnnnnnnnnnnnnnnnnnnnnnnnnnnnnnnnnnnnnnnnnnnnnnnnnnnnnnnnnnnnnnnnnnnnnnnnnnnnnnnnnnnnnnnnnnnnnnnnnnnnnnnnnnnnnnnnnnnnnnnnnnnnnnnnnnnnnnnnnnnnnnnnnnnnnnnnnnnnnnnnnnnnnnnnnnnnnnnnnnnnnnnnnnnnnnnnnnnnnnnnnnnnnnnnnnnnnnnnnnnnnnnnnnnnnnnnnnnnnnnnnnnnnnnnnnnnnnnnnnnnnnnnnnnnnnnnnnnnnnnnnnnnnnnnnnnnnnnnnnnnnnnnnnnnnnnnnnnnnnnnnnnnnnnnnnnnnnnnnnnnnnnnnnnnnnnnnnnnnnnnnnnnnnnnnnnnnnnnnnnnnnnnnnnnnnnnnnnnnnnnnnnnnnnnnnnnnnnnnnnnnnnnnnnnnnnnnnnnnnnnnnnnnnnnnnnnnnnnnnnnnnnnnnnnnnnnnnnnnnnnnnnnnnnnnnnnnnnnnnnnnnnnnnnnnnnnnnnnnnnnnnnnnnnnnnnnnnnnnnnnnnnnnnnnnnnnnnnnnnnnnnnnnnnnnnnnnnnnnnnnnnnnnnnnnnnnnnnnnnnnnnnnnnnnnnnnnnnnnnnnnnnnnnnnnnnnnnnnnnnnnnnnnnnnnnnnnnnnnnnnnnnnnnnnnnnnnnnnnnnnnnnnnnnnnnnnnnnnnnnnnnnnnnnnnnnnnnnnnnnnnnnnnnnnnnnnnnnnnnnnnnnnnnnnnnnnnnnnnnnnnnnnnnnnnnnnnnnnnnnnnntagcttgaataatctggcattgctgtactggaaccaagatgacacaagccgcgctcttgagtttttaactcaaggaataacagttcaagaacacaacctcactctcaacttggctgtcggttttgagcgacaaaaacgcgattacgtcaagactatctctgctaccacagatgcttccatttcactgcacctcaatggtgctgctaataaccccagtgctgctaatttagctctaagcacagtcttacaacgcaaaggacgcatcttggatgtcctcactaatagccagcaaattctacgtcaacgcctagacccagaaagcaagactctgttaacgaagttagcaaacacccaaactcaactagccaatctattttataaccgaccagagaaacttcctcttgagcagtatcggactcaaattgcccaactggaaacccaagcaaaacaactagaagatcaactgagtcgtcgcagccaagaatttcgtactcagtcccagcttgtcaccattgaaactgttcaaaaattaattcctgctgatggtgctttggtagaaatagtccgctatcgacctgttaatcttaaagcagcacctgaagatcagtttggtaaacctcgttacgcagtatacgtccttccagcaaaaggacaacctaaaggtattgatttaggcgatgctgaaacaattgagcaaactctcatccaattacgcaaggacttgcaagatcaaaaaactcctatttctcaaatgaaacagtcggctcgtgagttggattcaattctcatgcagcctgtacgcaaacttttgggcaatactcgcaaaattttactctctccagacagtcagcttcacctcattccctttgaggcactggtggatgaaaataaccgctacctactagaaaactattctttcacctaccttacctctggacgagacttgctcagactgcaaaacaaatctgccagtaaacagccgccagttattattgctgaccccaatttcaatcgtcctggcaaattagttgcgcgtcagccttatgctaatagtattgatgcaaatacccgctctatagacctgtcccagaaagtatttccccccctccccggtacagcacaagaagccaaggccattgccagtctattaaaaatccaacctcttacagacactaaggctactgagggtgctgtcaaacaagttaacagccccaggattctgcatattgccacacacggtatttttgaaaatcccccagcaaacgaagggaaaaccacacttgaagataatccgctactgcaatcaggattagttctagctggcttaaaacctcgtcagagtgctggtgaagatgggattctcactgccctggaaacaactacactcaatctagttggtacaaaactggtggtactctctgcctgtaatacaggtttgggtaatattaatgcaggtgaaggcgtttatggtttgcgtcgcgctttagtcattgctggttctgaaagccaagtcatcagcctgtggaaagtagcagatgatgctactaaagattttatggtggcttactaccaaagattattagataatcaaggacgcagtgaagcactacgccaaacgcaactagagatgttaaagggtgataagtatcagcatccctacttctgggctgcgtttatcccttctggtgattggaaaccgatgggtaagtgagttagttttgagagctttggcgatccttccatattatcggctcaacatgaaatagagtgcgatcgcctccctcgaaactaaactgttgattcagctttgtactgggaatgcgatgcgatcgccactaaatcttggagtaaatattcccaaatccttacggggaagtaatttgcaaaattgtacaacttttttatttctttttggatagtagcctgatgaaattgtagaactttattttttcaagacttcttagtaatcaacgatataacaatccttgtagccgcgcaaattatacaactttattatatttatacagaggttgtagagaaataattcgattcaacaataaagatgttaaaaataacctctaaagaattactaaaataattgcaaatagaggttatttttattggaacagagacaaaacaggtttttcaaaggctagagtctttcgatatcaggtaaaatttgataaatctgctgccagtgaggacttatccagccaacaatacgcactacttctcgtaaaattacgatagacaaaccgcattcaaccttctcaaaagcagttgcacaatctgttaatagacttacgaaactatctagtttttgtaatttcatctttgctaatccatctgcaaattgcccaatttgagctaatactacactaatttcgcctaaactctcttcgtccatatccttacatattaaatcccaatctttcttgatttctgaaaatatctcctcagcttctacttcttgcccttgttgataaaaggcttctactaaactatataaagctactatcttttctggtgtatcttcaatcaagcctgctactttcttagctttagaacaaaagccaaatcttgctaagacttgtgttaaattctctaataaaaatggttgatcaaaaggattatccatttcaagaatcatttcttctatttcagttagcaatatatctgctctttctgcgtattcacccttataaaggctatttaataatattgttaaagcttggatttggaaaaaaccagtttcaagttttctggctattctttcggtagctaaaaatagagtattagcatttttgggtttgtttatacaattaaatgcgactgccaaatcagtcattaatcataagcgataaggctcatt

SEQ ID NO: 75 - DNA, 36 bp, Artificial Sequence
  Synthetic
ctgctcaacgcctaatggcatctaatgttgaagcac

SEQ ID NO: 76 - DNA, 36 bp, Artificial Sequence; identical to SEQ ID NO: 75
  Synthetic

SEQ ID NO: 77 - DNA, 36 bp, Artificial Sequence; identical to SEQ ID NO: 75
  Synthetic

SEQ ID NO: 78 - DNA, 36 bp, Artificial Sequence; identical to SEQ ID NO: 75
  Synthetic

SEQ ID NO: 79 - DNA, 16 bp, Artificial Sequence
  Synthetic
aggcattacacaatac

SEQ ID NO: 80 - DNA, 16 bp, Artificial Sequence
  Synthetic
aggcattacacaatac

SEQ ID NO: 81 - DNA, 16 bp, Artificial Sequence
  Synthetic
aggcattacacaatac

SEQ ID NO: 82 - DNA, 16 bp, Artificial Sequence
  Synthetic
aggcattacacaatac

SEQ ID NO: 83 - protein, 243 aa, Artificial Sequence
  Synthetic
MIAPLILYLDVPFTTFRESHAREMGKTYPVPPPATVYGMLLSLVGETNVYRHCGVELAIAMLSSPKKSRILRQMRRFKNADFSHPENVIPCYQEILSNLKCLIWVRSDEEKIQPSLRERIQLAFDHPELVRRFGCLFLGESDQLIKTIKLAREDYLEGVRQWAIRDNRGRLTLPYWVDHVGSRNTRFLRYRIEEMDRLSPPDLAWTMVQSPIGGSGGGGSGGGGSGGPKKKRKVYPYDVPDYA

SEQ ID NO: 84 - protein, 251 aa, Artificial Sequence
  Synthetic
MTAILIQSEEYVDLTFKLRGAPIPLDNGYLTYAALSRICPPLHELKSIGIHPIAGIPTRNNLLELTAQSRLKIRIYHQQIPLIYPYLAGQAFHIGQNFYQLDIPDYKPLISSESVYSRLVIIKGFQDSTNFIEAVQRQMDNLGIQGKIELLTRQDGTPQRRQLTINKEGKQFKVRGFGVKISELNPEDSLTLQEQGIGGKRKMMCGIFVPATRSKEEEETGGSGGGGSGGGGSGGPKKKRKVYPYDVPDYA

SEQ ID NO: 85 - protein, 354 aa, Artificial Sequence
  Synthetic
MMTQKKNDSNIPNYYLYGTVLTRYGLASLNHDIRRGNKTILQKGYWNNGKIHSFVGSSAIRWALRFYLQKQGYLVNRVWDEEEHINRLTSEDFDPEKFYDDDIFGFALLESAETEEDTSTTKRKKKQTKTSTPNQRMGALGMNMAVSLTPYDGAVKLGAKSGREKDSTSLHFTEYHATRYQYYFGIDATHLKDFSRILPMIDGIMNLPKVGGSSNIFNYPFCPDSLVFQWTNHFASYISYCFEYCDPKSKEAKLSQEFIDEVECGQIDPSKLWIGGTIVKDLQQLDNFESSPLNKAHIYRNRNEMIEALKTVIKRDLGLEESKGGSGGGGSGGGGSGGPKKKRKVYPYDVPDYA

SEQ ID NO: 86 - protein, 557 aa, Artificial Sequence
  Synthetic
MIVSTQPKISLSLHAADTTIMHRVGMTGLYMTLKRLEKQYPLSRQRGGHISWFLTADTIELFWEGSDFIALSWLINESFQLDDTGLIHLVGLDNDRIDLRQKIHIHEGICGVFLRLNKFYQAGEIINTELRFEEKQVEYQYKSLTWYAHQTFAEKLCEADTQQLRHDYIQITSWLYLGGIVRHARTQNTTKLEEKPEYALALLFVPVVCHYCLLHIPSEDLKERKPHRYLVVIPEIKDFEDASQRRWRLQQLETKQFHVSSLGEAGLLYYSLDDIQPEVAYYQACQVWLYEKTNKASRQRTLMSIEEIKIDKNILITYQQVQKYFKTNYQIIKYKQIFIKVNPIRSLIADNLVKGIHWWSNFWEKLVIEDSKEYLFNQLFSNREGFIIMAENSEEDKQYLIFIKVFQQAMKGNFAKIYAKTEEGKDPPIKKKVERLRAELNYCYDELSFKEYLSDFLVRGGLNKYFNEHQEEIALLIKKSPWQEIRIWSLLAIASYKPKDKLTNRDDSSLSNNQKLEEVNDDSEEEGGSGGGGSGGGGSGGPKKKRKVYPYDVPDYA

SEQ ID NO: 87 - protein, 243 aa, Artificial Sequence
  Synthetic
MYPYDVPDYAPKKKRKVGGSGGGGSGGGGSGGIAPLILYLDVPFTTFRESHAREMGKTYPVPPPATVYGMLLSLVGETNVYRHCGVELAIAMLSSPKKSRILRQMRRFKNADFSHPENVIPCYQEILSNLKCLIWVRSDEEKIQPSLRERIQLAFDHPELVRRFGCLFLGESDQLIKTIKLAREDYLEGVRQWAIRDNRGRLTLPYWVDHVGSRNTRFLRYRIEEMDRLSPPDLAWTMVQSPI

SEQ ID NO: 88 - protein, 251 aa, Artificial Sequence
  Synthetic
MYPYDVPDYAPKKKRKVGGSGGGGSGGGGSGGTAILIQSEEYVDLTFKLRGAPIPLDNGYLTYAALSRICPPLHELKSIGIHPIAGIPTRNNLLELTAQSRLKIRIYHQQIPLIYPYLAGQAFHIGQNFYQLDIPDYKPLISSESVYSRLVIIKGFQDSTNFIEAVQRQMDNLGIQGKIELLTRQDGTPQRRQLTINKEGKQFKVRGFGVKISELNPEDSLTLQEQGIGGKRKMMCGIFVPATRSKEEEET

SEQ ID NO: 89 - protein, 354 aa, Artificial Sequence
  Synthetic
MYPYDVPDYAPKKKRKVGGSGGGGSGGGGSGGMTQKKNDSNIPNYYLYGTVLTRYGLASLNHDIRRGNKTILQKGYWNNGKIHSFVGSSAIRWALRFYLQKQGYLVNRVWDEEEHINRLTSEDFDPEKFYDDDIFGFALLESAETEEDTSTTKRKKKQTKTSTPNQRMGALGMNMAVSLTPYDGAVKLGAKSGREKDSTSLHFTEYHATRYQYYFGIDATHLKDFSRILPMIDGIMNLPKVGGSSNIFNYPFCPDSLVFQWTNHFASYISYCFEYCDPKSKEAKLSQEFIDEVECGQIDPSKLWIGGTIVKDLQQLDNFESSPLNKAHIYRNRNEMIEALKTVIKRDLGLEESK

SEQ ID NO: 90 - protein, 557 aa, Artificial Sequence
  Synthetic
MYPYDVPDYAPKKKRKVGGSGGGGSGGGGSGGIVSTQPKISLSLHAADTTIMHRVGMTGLYMTLKRLEKQYPLSRQRGGHISWFLTADTIELFWEGSDFIALSWLINESFQLDDTGLIHLVGLDNDRIDLRQKIHIHEGICGVFLRLNKFYQAGEIINTELRFEEKQVEYQYKSLTWYAHQTFAEKLCEADTQQLRHDYIQITSWLYLGGIVRHARTQNTTKLEEKPEYALALLFVPVVCHYCLLHIPSEDLKERKPHRYLVVIPEIKDFEDASQRRWRLQQLETKQFHVSSLGEAGLLYYSLDDIQPEVAYYQACQVWLYEKTNKASRQRTLMSIEEIKIDKNILITYQQVQKYFKTNYQIIKYKQIFIKVNPIRSLIADNLVKGIHWWSNFWEKLVIEDSKEYLFNQLFSNREGFIIMAENSEEDKQYLIFIKVFQQAMKGNFAKIYAKTEEGKDPPIKKKVERLRAELNYCYDELSFKEYLSDFLVRGGLNKYFNEHQEEIALLIKKSPWQEIRIWSLLAIASYKPKDKLTNRDDSSLSNNQKLEEVNDDSEEE

SEQ ID NO: 91 - protein, 360 aa, Artificial Sequence
  Synthetic
MYPYDVPDYAPKKKRKVGGSGGGGSGGGGSGGTIYSEHWSLNPLEIPQRSRLFSLEPVAVGTPYAESLSSYLHRLAQAHCLTSEKLVMGEIAPLILKDEDKSELLSKNLSHLLGNSDAKPAINGMREMTEKLVTVLEELTMRQDLRFLTLLSWKGMIYDKGLFRNYRAWCPCCCEEWMQKNKTIYEPLSWSFKDVEFCLIHKQRLIEECSHCGARLPVMARLSPAGFCSRCYGWLGQEIKGEEEIEKYRVNIQGISELIALTPQLGYKPIPIELTRKLQLILLVFEQAIGKDVKLLGDLGGIMESLRIASTTNQSQPYHLVKLIIPVCEKAKISVFQLFGSDFKELGKILFGNFSLELKL

SEQ ID NO: 92 - protein, 493 aa, Artificial Sequence
  Synthetic
MYPYDVPDYAPKKKRKVGGSGGGGSGGGGSGGLASVLETYESWNLKKPLIPQRSRLYQPQPVGIGTPYIESLTGYITRIAELHGVLPGVLMTREIAPLVNKIYFQNGANRGFREIFNRSQALNGMGEMAADLVQVLQKLTLRDDLRFLTMLFWSNILTPRNLFRTRKAWCPICYQERHQNGLVVYEQLLWTINLITICPQHQKPLVELCPHCNHESPLLNWRSRPGYCSKCGEWLGANQCLKTFTDGEGSIKLQLEWQYWTANVVGELILASQCFESAPSKENITKSLNIVIDKVAENNAAAFSRLIGVPKNSLWMWQSTKTLPELNTLLKICYELEISLVEFLTPKNLITKSFTKISQKHLQLSRTPRVSPKSFDQYQVKDALLAILAGNEEPPPTMEEVGKRLGHHNRTISRHFPDLCSAISAKCRNYNKACRLKSIEKLCSEVREIVLSLNAQGVYPTEGRVCELMPNPGCFRYKQVRAAFNDARREFGL

SEQ ID NO: 93 - protein, 929 aa, Artificial Sequence
  Synthetic
MYPYDVPDYAPKKKRKVGGSGGGGSGGGGSGGKEQFEQWVARLQISEAGQKIIEKVRSSEPSRRVGGGSKNVSGRYPSRKMGVTIQFESHRVELPIIYQLEHDKDVLEFYDQPPQIKLDYQASNGRRLGVLHTPDLFVIRTNSAGWEECKTEQDLKKLAEKNPNRYFYSEENNQWHSLPGEVYANQFGLYHRIHSDREINWVLQRNLQFLEDYYRSESLVVEEAIAQSLLAIVSSQPGITLAELLNRSTGAKSDDIYTLIIQEQIYIDLNATPLAEPERCLIFRDEQTASAYRLMVEQPSVSLPAISPVVNIVTGATVSWDGKGLNIIHVGETEVILGAENNQLIELKKAIFENLVRQGKITSLQTPEKTAISTESWQRFHQASPEDQAEALERYKTIEPYLNGHPPENETIPARTIRHWKAKYLIAIQKYGCGYIGLLSHRSVKGNRQRKLPEDTLAIMEKFILEDYETLKQKRMWEVHAALVRACEEAGVIAPSYKAFTKEVQRRTGYEQTKKRQGRRAAYQHESFYWELAITTPRHGDRPFEIGHIDHTELDVELVCSDTGRNLGRPWATFLVDAYSRRLLAVYLTFDSPSYRSCLMVLRICVKRHGRLPQIVVVDNGAEFHSVYFETLLATFECTKKQRPPAKARFGSVCERLFGTSNTQFVHNLLGNTQITRNVRQVTKSVNPKNLAVWTLGLLYEYLCAWAYEVYDTDEHPALFQSPRDAFAAGMAIGGSRVHRMIPYDENFQILTLPTTSEGKAKVQVGRGIKINYIYYWSNSFRDPQIENTSVQIRYDPFNIGIAYAFVRGQWVQCISQYYAELQGRSEKELKLASIELRKHYSNHTQQSKVSAKNLAEFLASVEAQEALLEQRSYDAEVKEVFRVIEGGKATTSRNEEPKLIQVTFANTDFQADEDEAIVPETLVVYEEF

SEQ ID NO: 94 - protein, 414 aa, Artificial Sequence
  Synthetic
MYPYDVPDYAPKKKRKVGGSGGGGSGGGGSGGTKSTGFPLELLTRPATERLAYFENYTVAHPRLKEVYEILMRTIAEPAGASFIFVYGASGVGKTTLRLRVEQKLTELALPKLESDRARVPVVGIEAIAPESRYFNWKEYYTRALITLEEPLIDHKFDYGVRGISRDNFGKINVESKVVAPALRRALENALIHRHPDVFFVDEAQHFGKVASGYKLQDQLDCLKSLANMTGILHCLLGTYELLTFRNLSGQLSRRSVDIHFRRYCADSPEDVQAFKSVLLTFQQHLPLAETPNLVDHWEYFYERTLGCIGTLKDWLKRVLSDALDREATTITLKDLQKRALSVAQCQKMFKEIQEGERQLSETEADVQNLRSALGLGAKPIVLPEETPKTTRPPGKVGKRKPKRDPIGVQQDVS

SEQ ID NO: 95 - protein, 360 aa, Artificial Sequence
  Synthetic
MTIYSEHWSLNPLEIPQRSRLFSLEPVAVGTPYAESLSSYLHRLAQAHCLTSEKLVMGEIAPLILKDEDKSELLSKNLSHLLGNSDAKPAINGMREMTEKLVTVLEELTMRQDLRFLTLLSWKGMIYDKGLFRNYRAWCPCCCEEWMQKNKTIYEPLSWSFKDVEFCLIHKQRLIEECSHCGARLPVMARLSPAGFCSRCYGWLGQEIKGEEEIEKYRVNIQGISELIALTPQLGYKPIPIELTRKLQLILLVFEQAIGKDVKLLGDLGGIMESLRIASTTNQSQPYHLVKLIIPVCEKAKISVFQLFGSDFKELGKILFGNFSLELKLGGSGGGGSGGGGSGGPKKKRKVYPYDVPDYA

SEQ ID NO: 96 - protein, 493 aa, Artificial Sequence
  Synthetic
MLASVLETYESWNLKKPLIPQRSRLYQPQPVGIGTPYIESLTGYITRIAELHGVLPGVLMTREIAPLVNKIYFQNGANRGFREIFNRSQALNGMGEMAADLVQVLQKLTLRDDLRFLTMLFWSNILTPRNLFRTRKAWCPICYQERHQNGLVVYEQLLWTINLITICPQHQKPLVELCPHCNHESPLLNWRSRPGYCSKCGEWLGANQCLKTFTDGEGSIKLQLEWQYWTANVVGELILASQCFESAPSKENITKSLNIVIDKVAENNAAAFSRLIGVPKNSLWMWQSTKTLPELNTLLKICYELEISLVEFLTPKNLITKSFTKISQKHLQLSRTPRVSPKSFDQYQVKDALLAILAGNEEPPPTMEEVGKRLGHHNRTISRHFPDLCSAISAKCRNYNKACRLKSIEKLCSEVREIVLSLNAQGVYPTEGRVCELMPNPGCFRYKQVRAAFNDARREFGLGGSGGGGSGGGGSGGPKKKRKVYPYDVPDYA

SEQ ID NO: 97 - protein, 929 aa, Artificial Sequence
  Synthetic
MKEQFEQWVARLQISEAGQKIIEKVRSSEPSRRVGGGSKNVSGRYPSRKMGVTIQFESHRVELPIIYQLEHDKDVLEFYDQPPQIKLDYQASNGRRLGVLHTPDLFVIRTNSAGWEECKTEQDLKKLAEKNPNRYFYSEENNQWHSLPGEVYANQFGLYHRIHSDREINWVLQRNLQFLEDYYRSESLVVEEAIAQSLLAIVSSQPGITLAELLNRSTGAKSDDIYTLIIQEQIYIDLNATPLAEPERCLIFRDEQTASAYRLMVEQPSVSLPAISPVVNIVTGATVSWDGKGLNIIHVGETEVILGAENNQLIELKKAIFENLVRQGKITSLQTPEKTAISTESWQRFHQASPEDQAEALERYKTIEPYLNGHPPENETIPARTIRHWKAKYLIAIQKYGCGYIGLLSHRSVKGNRQRKLPEDTLAIMEKFILEDYETLKQKRMWEVHAALVRACEEAGVIAPSYKAFTKEVQRRTGYEQTKKRQGRRAAYQHESFYWELAITTPRHGDRPFEIGHIDHTELDVELVCSDTGRNLGRPWATFLVDAYSRRLLAVYLTFDSPSYRSCLMVLRICVKRHGRLPQIVVVDNGAEFHSVYFETLLATFECTKKQRPPAKARFGSVCERLFGTSNTQFVHNLLGNTQITRNVRQVTKSVNPKNLAVWTLGLLYEYLCAWAYEVYDTDEHPALFQSPRDAFAAGMAIGGSRVHRMIPYDENFQILTLPTTSEGKAKVQVGRGIKINYIYYWSNSFRDPQIENTSVQIRYDPFNIGIAYAFVRGQWVQCISQYYAELQGRSEKELKLASIELRKHYSNHTQQSKVSAKNLAEFLASVEAQEALLEQRSYDAEVKEVFRVIEGGKATTSRNEEPKLIQVTFANTDFQADEDEAIVPETLVVYEEFGGSGGGGSGGGGSGGPKKKRKVYPYDVPDYA

SEQ ID NO: 98 - protein, 414 aa, Artificial Sequence
  Synthetic
MTKSTGFPLELLTRPATERLAYFENYTVAHPRLKEVYEILMRTIAEPAGASFIFVYGASGVGKTTLRLRVEQKLTELALPKLESDRARVPVVGIEAIAPESRYFNWKEYYTRALITLEEPLIDHKFDYGVRGISRDNFGKINVESKVVAPALRRALENALIHRHPDVFFVDEAQHFGKVASGYKLQDQLDCLKSLANMTGILHCLLGTYELLTFRNLSGQLSRRSVDIHFRRYCADSPEDVQAFKSVLLTFQQHLPLAETPNLVDHWEYFYERTLGCIGTLKDWLKRVLSDALDREATTITLKDLQKRALSVAQCQKMFKEIQEGERQLSETEADVQNLRSALGLGAKPIVLPEETPKTTRPPGKVGKRKPKRDPIGVQQDVSGGSGGGGSGGGGSGGPKKKRKVYPYDVPDYA

SEQ ID NO: 99 - DNA, 3815 bp, Artificial Sequence
  Synthetic
tcgcgcgtttcggtgatgacggtgaaaacctctgacacatgcagctcccggagacggtcacagcttgtctgtaagcggatgccgggagcagacaagcccgtcagggcgcgtcagcgggtgttggcgggtgtcggggctggcttaactatgcggcatcagagcagattgtactgagagtgcaccatatgcggtgtgaaataccgcacagatgcgtaaggagaaaataccgcatcaggcgccattcgccattcaggctgcgcaactgttgggaagggcgatcggtgcgggcctcttcgctattacgccagctggcgaaagggggatgtgctgcaaggcgattaagttgggtaacgccagggttttcccagtcacgacgttgtaaaacgacggccagtgaattgacgcgtattgggatcaatggctggtactataattcccctggttgctgaagcggtaaaagtgcgtcaactagttttgtgactttacccataactttgccgttactggaaccataactttgccgtcaacaacactacaaccctcattcttgcgtcagctaattttggatgaaattgacagtttggaaccataactttgccgctagtccaaattggaaggataagcttgccgtgagtccaatcaagcatagaaagcaggaaaacgccgaatttttttagaatggagcagaagcgtcgatggagaaaaaaatcactggatataccaccgttgatatatcccaatggcatcgtaaagaacattttgaggcatttcagtcagttgctcaatgtacctataaccagaccgttcagctggatattacggcctttttaaagaccgtaaagaaaaataagcacaagttttatccggcctttattcacattcttgcccgcctgatgaatgctcatccggagttccgtatggcaatgaaagacggtgagctggtgatatgggatagtgttcacccttgttacaccgttttccatgagcaaactgaaacgttttcatcgctctggagtgaataccacgacgatttccggcagtttctacacatatattcgcaagatgtggcgtgttacggtgaaaacctggcctatttccctaaagggtttattgagaatatgtttttcgtctcagccaatccctgggtgagtttcaccagttttgatttaaacgtggccaatatggacaacttcttcgcccccgttttcactatgggcaaatattatacgcaaggcgacaaggtgctgatgccgctggcgattcaggttcatcatgccgtttgtgatggcttccatgtcggcagaatgcttaatgaattacaacagtactgcgatgagtggcagggcggggcgtaacactcacgacgtgagtttggtttgtaagctgttatatgtaaaactagaacagcttatataactggaaccataaccttgccaccctttattggaagcataagcttgccgttgcggcaaagttatgggtaaagtcacatctaagctgtctctagcctttatttactgaatgggcagtaccagactcgaactgatgacaatcccaatggcgcgccgagcttggcgtaatcatggtcatagctgtttcctgtgtgaaattgttatccgctcacaattccacacaacatacgagccggaagcataaagtgtaaagcctggggtgcctaatgagtgagctaactcacattaattgcgttgcgctcactgcccgctttccagtcgggaaacctgtcgtgccagctgcattaatgaatcggccaacgcgcggggagaggcggtttgcgtattgggcgctcttccgcttcctcgctcactgactcgctgcgctcggtcgttcggctgcggcgagcggtatcagctcactcaaaggcggtaatacggttatccacagaatcaggggataacgcaggaaagaacatgtgagcaaaaggccagcaaaaggccaggaaccgtaaaaaggccgcgttgctggcgtttttccataggctccgcccccctgacgagcatcacaaaatcacaaaaatcgacgctcaagtcagaggtggcgaaacccgacaggactataaagataccaggcgtttccccctggaagctccctcgtgcgctctcctgttccgaccctgccgcttaccggatacctgtccgcctttctcccttcgggaagcgtggcgctttctcatagctcacgctgtaggtatctcagttcggtgtaggtcgttcgctccaagctgggctgtgtgcacgaaccccccgttcagcccgaccgctgcgccttatccggtaactatcgtcttgagtccaacccggtaagacacgacttatcgccactggcagcagccactggtaacaggattagcagagcgaggtatgtaggcggtgctacagagttcttgaagtggtggcctaactacggctacactagaagaacagtatttggtatctgcgctctgctgaagccagttaccttcggaaaaagagttggtagctcttgatccggcaaacaaaccaccgctggtagcggtggtttttttgtttgcaagcagcagattacgcgcagaaaaaaaggatctcaagaagatcctttgatcttttctacggggtctgacgctcagtggaacgaaaactcacgttaagggattttggtcatgagattatcaaaaaggatcttcacctagatccttttaaattaaaaatgaagttttaaatcaatctaaagtatatatgagtaaacttggtctgacagttaccaatgcttaatcagtgaggcacctatctcagcgatctgtctatttcgttcatccatagttgcctgactccccgtcgtgtagataactacgatacgggagggcttaccatctggccccagtgctgcaatgataccgcgagacccacgctcaccggctccagatttatcagcaataaaccagccagccggaagggccgagcgcagaagtggtcctgcaactttatccgcctccatccagtctattaattgttgccgggaagctagagtaagtagttcgccagttaatagtttgcgcaacgttgttgccattgctacaggcatcgtggtgtcacgctcgtcgtttggtatggcttcattcagctccggttcccaacgatcaaggcgagttacatgatcccccatgttgtgcaaaaaagcggttagctccttcggtcctccgatcgttgtcagaagtaagttggccgcagtgttatcactcatggttatggcagcactgcataattctcttactgtcatgccatccgtaagatgcttttctgtgactggtgagtactcaaccaagtcattctgagaatagtgtatgcggcgaccgagttgctcttgcccggcgtcaatacgggataataccgcgccacatagcagaactttaaaagtgctcatcattggaaaacgttcttcggggcgaaaactctcaaggatcttaccgctgttgagatccagttcgatgtaacccactcgtgcacccaactgatcttcagcatcttttactttcaccagcgtttctgggtgagcaaaaacaggaaggcaaaatgccgcaaaaaagggaataagggcgacacggaaatgttgaatactcatactcttcctttttcaatattattgaagcatttatcagggttattgtctcatgagcggatacatatttgaatgtatttagaaaaataaacaaataggggttccgcgcacatttccccgaaaagtgccacctgacgtctaagaaaccattattatcatgacattaacctataaaaataggcgtatcacgaggccctttcgtc

SEQ ID NO: 100 - DNA, 3018 bp, Artificial Sequence
  Synthetic
aattctgtggaatgtgtgtcagttagggtgtggaaagtccccaggctccccagcaggcagaagtatgcaaagcatgcatctcaattagtcagcaaccaggtgtggaaagtccccaggctccccagcaggcagaagtatgcaaagcatgcatctcaattagtcagcaaccatagtcccgcccctaactccgcccatcccgcccctaactccgcccagttccgcccattctccgccccatggctgactaattttttttatttatgcagaggccgaggccgcctctgcctctgagctattccagaagtagtgaggaggcttttttggaggcctaggcttttgcaaaaagctaacttgtttattgcagcttataatggttacaaataaagcaatagcatcacaaatttcacaaataaagcatttttttcactgcattctagttgtggtttgtccaaactcatcaatgtatcttatcatgtctgtataccgtcgacctctagctagagcttggcgtaatcatggtcatagctgtttcctgtgtgaaattgttatccgctcacaattccacacaacatacgagccggaagcataaagtgtaaagcctggggtgcctaatgagtgagctaactcacattaattgcgttgcgctcactgcccgctttccagtcgggaaacctgtcgtgccagctgcattaatgaatcggccaacgcgcggggagaggcggtttgcgtattgggcgctcttccgcttcctcgctcactgactcgctgcgctcggtcgttcggctgcggcgagcggtatcagctcactcaaaggcggtaatacggttatccacagaatcaggggataacgcaggaaagaacatgtgagcaaaaggccagcaaaaggccaggaaccgtaaaaaggccgcgttgctggcgtttttccataggctccgcccccctgacgagcatcacaaaaatcgacgctcaagtcagaggtggcgaaacccgacaggactataaagataccaggcgtttccccctggaagctccctcgtgcgctctcctgttccgaccctgccgcttaccggatacctgtccgcctttctcccttcgggaagcgtggcgctttctcatagctcacgctgtaggtatctcagttcggtgtaggtcgttcgctccaagctgggctgtgtgcacgaaccccccgttcagcccgaccgctgcgccttatccggtaactatcgtcttgagtccaacccggtaagacacgacttatcgccactggcagcagccactggtaacaggattagcagagcgaggtatgtaggcggtgctacagagttcttgaagtggtggcctaactacggctacactagaagaacagtatttggtatctgcgctctgctgaagccagttaccttcggaaaaagagttggtagctcttgatccggcaaacaaaccaccgctggtagcggtttttttgtttgcaagcagcagattacgcgcagaaaaaaaggatctcaagaagatcctttgatcttttctacggggtctgacgctcagtggaacgaaaactcacgttaagggattttggtcatgagattatcaaaaaggatcttcacctagatccttttaaattaaaaatgaagttttaaatcaatctaaagtatatatgagtaaacttggtctgacagttaccaatgcttaatcagtgaggcacctatctcagcgatctgtctatttcgttcatccatagttgcctgactccccgtcgtgtagataactacgatacgggagggcttaccatctggccccagtgctgcaatgataccgcgagacccacgctcaccggctccagatttatcagcaataaaccagccagccggaagggccgagcgcagaagtggtcctgcaactttatccgcctccatccagtctattaattgttgccgggaagctagagtaagtagttcgccagttaatagtttgcgcaacgttgttgccattgctacaggcatcgtggtgtcacgctcgtcgtttggtatggcttcattcagctccggttcccaacgatcaaggcgagttacatgatcccccatgttgtgcaaaaaagcggttagctccttcggtcctccgatcgttgtcagaagtaagttggccgcagtgttatcactcatggttatggcagcactgcataattctcttactgtcatgccatccgtaagatgcttttctgtgactggtgagtactcaaccaagtcattctgagaatagtgtatgcggcgaccgagttgctcttgcccggcgtcaatacgggataataccgcgccacatagcagaactttaaaagtgctcatcattggaaaacgttcttcggggcgaaaactctcaaggatcttaccgctgttgagatccagttcgatgtaacccactcgtgcacccaactgatcttcagcatcttttactttcaccagcgtttctgggtgagcaaaaacaggaaggcaaaatgccgcaaaaaagggaataagggcgacacggaaatgttgaatactcatactcttcctttttcaatattattgaagcatttatcagggttattgtctcatgagcggatacatatttgaatgtatttagaaaaataaacaaataggggttccgcgcacatttccccgaaaagtgccacctgagggcctatttcccatgattccttcatatttgcatatacgatacaaggctgttagagagataattagaattaatttgactgtaaacacaaagatattagtacaaaatacgtgacgtagaaagtaataatttcttgggtagtttgcagttttaaaattatgttttaaaatggactatcatatgcttaccgtaacttgaaagtatttcgatttcttggctttatatatcttgtggaaaggacgtgagtcgtggctttatgccgttaggcgttgcaaccatctatgtatagctacgatggaatagtaaagggtgagtcgtggctttatgccgttaggcgttgctcaatttttt

SEQ ID NO: 101 - DNA, 3018 bp, Artificial Sequence
  Synthetic
aattctgtggaatgtgtgtcagttagggtgtggaaagtccccaggctccccagcaggcagaagtatgcaaagcatgcatctcaattagtcagcaaccaggtgtggaaagtccccaggctccccagcaggcagaagtatgcaaagcatgcatctcaattagtcagcaaccatagtcccgcccctaactccgcccatcccgcccctaactccgcccagttccgcccattctccgccccatggctgactaattttttttatttatgcagaggccgaggccgcctctgcctctgagctattccagaagtagtgaggaggcttttttggaggcctaggcttttgcaaaaagctaacttgtttattgcagcttataatggttacaaataaagcaatagcatcacaaatttcacaaataaagcatttttttcactgcattctagttgtggtttgtccaaactcatcaatgtatcttatcatgtctgtataccgtcgacctctagctagagcttggcgtaatcatggtcatagctgtttcctgtgtgaaattgttatccgctcacaattccacacaacatacgagccggaagcataaagtgtaaagcctggggtgcctaatgagtgagctaactcacattaattgcgttgcgctcactgcccgctttccagtcgggaaacctgtcgtgccagctgcattaatgaatcggccaacgcgcggggagaggcggtttgcgtattgggcgctcttccgcttcctcgctcactgactcgctgcgctcggtcgttcggctgcggcgagcggtatcagctcactcaaaggcggtaatacggttatccacagaatcaggggataacgcaggaaagaacatgtgagcaaaaggccagcaaaaggccaggaaccgtaaaaaggccgcgttgctggcgtttttccataggctccgcccccctgacgagcatcacaaaaatcgacgctcaagtcagaggtggcgaaacccgacaggactataaagataccaggcgtttccccctggaagctccctcgtgcgctctcctgttccgaccctgccgcttaccggatacctgtccgcctttctcccttcgggaagcgtggcgctttctcatagctcacgctgtaggtatctcagttcggtgtaggtcgttcgctccaagctgggctgtgtgcacgaaccccccgttcagcccgaccgctgcgccttatccggtaactatcgtcttgagtccaacccggtaagacacgacttatcgccactggcagcagccactggtaacaggattagcagagcgaggtatgtaggcggtgctacagagttcttgaagtggtggcctaactacggctacactagaagaacagtatttggtatctgcgctctgctgaagccagttaccttcggaaaaagagttggtagctcttgatccggcaaacaaaccaccgctggtagcggtttttttgtttgcaagcagcagattacgcgcagaaaaaaaggatctcaagaagatcctttgatcttttctacggggtctgacgctcagtggaacgaaaactcacgttaagggattttggtcatgagattatcaaaaaggatcttcacctagatccttttaaattaaaaatgaagttttaaatcaatctaaagtatatatgagtaaacttggtctgacagttaccaatgcttaatcagtgaggcacctatctcagcgatctgtctatttcgttcatccatagttgcctgactccccgtcgtgtagataactacgatacgggagggcttaccatctggccccagtgctgcaatgataccgcgagacccacgctcaccggctccagatttatcagcaataaaccagccagccggaagggccgagcgcagaagtggtcctgcaactttatccgcctccatccagtctattaattgttgccgggaagctagagtaagtagttcgccagttaatagtttgcgcaacgttgttgccattgctacaggcatcgtggtgtcacgctcgtcgtttggtatggcttcattcagctccggttcccaacgatcaaggcgagttacatgatcccccatgttgtgcaaaaaagcggttagctccttcggtcctccgatcgttgtcagaagtaagttggccgcagtgttatcactcatggttatggcagcactgcataattctcttactgtcatgccatccgtaagatgcttttctgtgactggtgagtactcaaccaagtcattctgagaatagtgtatgcggcgaccgagttgctcttgcccggcgtcaatacgggataataccgcgccacatagcagaactttaaaagtgctcatcattggaaaacgttcttcggggcgaaaactctcaaggatcttaccgctgttgagatccagttcgatgtaacccactcgtgcacccaactgatcttcagcatcttttactttcaccagcgtttctgggtgagcaaaaacaggaaggcaaaatgccgcaaaaaagggaataagggcgacacggaaatgttgaatactcatactcttcctttttcaatattattgaagcatttatcagggttattgtctcatgagcggatacatatttgaatgtatttagaaaaataaacaaataggggttccgcgcacatttccccgaaaagtgccacctgagggcctatttcccatgattccttcatatttgcatatacgatacaaggctgttagagagataattagaattaatttgactgtaaacacaaagatattagtacaaaatacgtgacgtagaaagtaataatttcttgggtagtttgcagttttaaaattatgttttaaaatggactatcatatgcttaccgtaacttgaaagtatttcgatttcttggctttatatatcttgtggaaaggacgtgagtcgtggctttatgccgttaggcgttgcagagaagtcatttaataaggccactgttaaacgtaggtgagtcgtggctttatgccgttaggcgttgctcaatttttt

SEQ ID NO: 102 - DNA, 37 bp, Escherichia coli
actcctgctgcacaacaactccactgcatgtgtcaga

SEQ ID NO: 103 - DNA, 37 bp, Escherichia coli
tctggcgcttgctaccttgctgcacccagaaatccat

SEQ ID NO: 104 - DNA, 37 bp, Escherichia coli
gcgttgctgccgctaatcattagcgttatagtgaatc

SEQ ID NO: 105 - DNA, 37 bp, Escherichia coli
gacttctcctgaacttaagtctcagacctatttggcc

SEQ ID NO: 106 - DNA, 37 bp, Escherichia coli
gaatattaatgttactatctggttgagactgttgata

SEQ ID NO: 107 - DNA, 37 bp, Escherichia coli
ttctaaatcgacatgggcagtcgttctgtacactttg

SEQ ID NO: 108 - DNA, 37 bp, Escherichia coli
taatcgcaataatatattggctgtctattcatcgtgt

SEQ ID NO: 109 - DNA, 37 bp, Escherichia coli
ggcacgctaacaacgttttgttaaaaaatgtgaatca

SEQ ID NO: 110 - DNA, 37 bp, Escherichia coli
ctccagaccccctacaaagaatgtggatattgtgata

SEQ ID NO: 111 - DNA, 37 bp, Escherichia coli
tgctcacagaaacggagcggcacctcttttaaccctt

SEQ ID NO: 112 - DNA, 344 bp, Artificial Sequence
  Synthetic
ggtggtacgcataactttcataatgtctcctgggaggattcataaagcattgtttgttggctacgagaagcaaaataggacaaacaggtgacagttatatgtaaggaatatgacagttttatgacagagagataaagtcttcagtctgatttaaataagcgttgatattcagtcaattacaaacattaataacgaagagatgacagaaaaattttcattctgtgacagagaaaaagtagccgaagatgacggtttgtcacatggagttggcaggatgtttgattaaaaacataacaggaagaaaaatgccccgcttacgcagggcatccatttattactcaacc

SEQ ID NO: 113 - DNA, 20 bp, Artificial Sequence
  Synthetic
gtcccagtccgatctcttgc

SEQ ID NO: 114 - DNA, 22 bp, Artificial Sequence
  Synthetic
cctatttggccggtaatccctc

SEQ ID NO: 115 - DNA, 21 bp, Artificial Sequence
  Synthetic
tcgaatttgctctttttgcgc

SEQ ID NO: 116 - DNA, 26 bp, Artificial Sequence
  Synthetic
tgaaccgaattatatattgttgaacc

SEQ ID NO: 117 - DNA, 25 bp, Artificial Sequence
  Synthetic
tggtacaatcgtactcctttagagg

SEQ ID NO: 118 - DNA, 330 bp, Escherichia coli
gactcatctcaattatctcgccatgacctggctaagtcccagtccgatctcttgccgtcgcgttcacacctgaatgacttctcctgaacttaagtctcagacctatttggccggtaatccctctcgaatttgctctttttgcgccccgccttccatcaatattgtggaggaataattcggttcaacaatatataattcggttcaacaattaataaaacgattgaacaataacctctaaaggagtacgattgtaccaagtaaaagtgcgatcgcttccagaggttatttttatggttaggggtagaagggaatggcggggatccatggaga

SEQ ID NO: 119 - DNA, 330 bp, Escherichia coli
tctccatggatccccgccattcccttctacccctaaccataaaaataacctctggaagcgatcgcacttttacttggtacaatcgtactcctttagaggttattgttcaatcgttttattaattgttgaaccgaattatatattgttgaaccgaattattcctccacaatattgatggaaggcggggcgcaaaaagagcaaattcgagagggattaccggccaaataggtctgagacttaagttcaggagaagtcattcaggtgtgaacgcgacggcaagagatcggactgggacttagccaggtcatggcgagataattgagatgagtc

SEQ ID NO: 120 - DNA, 89 bp, Artificial Sequence
  Synthetic
ttcgaatttgctctttttgcgccccgccttcctgtggaggaataattcggttcaacaatatataattcggttcaagatcggaagagcgt

SEQ ID NO: 121 - DNA, 49 bp, Artificial Sequence
  Synthetic
tcggaatttgctctttttgcgcccctccttccatcaaccttaacagacc

SEQ ID NO: 122 - DNA, 49 bp, Artificial Sequence
  Synthetic
tccgaatttgctctttttgcgccccgccttccatcaaccttaacagact

SEQ ID NO: 123 - DNA, 49 bp, Artificial Sequence
  Synthetic
tcggaatttgctctttttgcgccccgccttccatcaaccttttcggttc

SEQ ID NO: 124 - DNA, 50 bp, Artificial Sequence
  Synthetic
tcggaatttgctctttttgcgccccgccttccatcaaccggaggaataat

SEQ ID NO: 125 - DNA, 50 bp, Artificial Sequence
  Synthetic
ttcgaatttgctctttttgcgccccgccttccatctgtggaggaataatt

SEQ ID NO: 126 - DNA, 50 bp, Artificial Sequence
  Synthetic
ttcgaatttgctctttttgcgccccgccttccatgtggaggaataattcg

SEQ ID NO: 127 - DNA, 50 bp, Artificial Sequence
  Synthetic
tcggaatttgctctttttgcgccccgccttcctgtggaggaataattcgg

SEQ ID NO: 128 - DNA, 50 bp, Artificial Sequence
  Synthetic
ttcgaatttgctctttttgcgccccgccttcctgtggaggaataattcgg

SEQ ID NO: 129 - DNA, 50 bp, Artificial Sequence; identical to SEQ ID NO: 127
  Synthetic

SEQ ID NO: 130 - DNA, 50 bp, Artificial Sequence; identical to SEQ ID NO: 128
  Synthetic

SEQ ID NO: 131 - DNA, 50 bp, Artificial Sequence; identical to SEQ ID NO: 128
  Synthetic

SEQ ID NO: 132 - DNA, 50 bp, Artificial Sequence; identical to SEQ ID NO: 128
  Synthetic

SEQ ID NO: 133 - DNA, 50 bp, Artificial Sequence; identical to SEQ ID NO: 128
  Synthetic

SEQ ID NO: 134 - DNA, 50 bp, Artificial Sequence
  Synthetic
tccgaatttgctctttttgcgccccgccttcctgtggaggaataattcgg

SEQ ID NO: 135 - DNA, 50 bp, Artificial Sequence; identical to SEQ ID NO: 127
  Synthetic

SEQ ID NO: 136 - DNA, 50 bp, Artificial Sequence; identical to SEQ ID NO: 134
  Synthetic

SEQ ID NO: 137 - DNA, 50 bp, Artificial Sequence; identical to SEQ ID NO: 127
  Synthetic

SEQ ID NO: 138 - DNA, 50 bp, Artificial Sequence; identical to SEQ ID NO: 134
  Synthetic

SEQ ID NO: 139 - DNA, 50 bp, Artificial Sequence; identical to SEQ ID NO: 127
  Synthetic

SEQ ID NO: 140 - DNA, 50 bp, Artificial Sequence; identical to SEQ ID NO: 128
  Synthetic

SEQ ID NO: 141 - DNA, 50 bp, Artificial Sequence; identical to SEQ ID NO: 134
  Synthetic

SEQ ID NO: 142 - DNA, 50 bp, Artificial Sequence
  Synthetic
tcggaatttgctctttttgcgccccgctgtggaggaataattcggttcaa

SEQ ID NO: 143 - DNA, 50 bp, Artificial Sequence
  Synthetic
tccgaatttgctctttttgcgcccctgtggaggaataattcggttcaaca

SEQ ID NO: 144 - DNA, 50 bp, Artificial Sequence
  Synthetic
tcggaatttgctctttttgcgcccctgtggaggaataattcggttcaaca

SEQ ID NO: 145 - DNA, 50 bp, Artificial Sequence
  Synthetic
tccgaatttgctctttttgcgccccgctggaggaataattcggttcaaca

SEQ ID NO: 146 - DNA, 50 bp, Artificial Sequence
  Synthetic
ttcgaatttgctctttttgcgcccctgtggaggaataattcggttcaaca

SEQ ID NO: 147 - DNA, 50 bp, Artificial Sequence; identical to SEQ ID NO: 144
  Synthetic

SEQ ID NO: 148 - DNA, 19 bp, Artificial Sequence
  Synthetic
aataatacggttgaacaat

SEQ ID NO: 149 - DNA, 19 bp, Artificial Sequence
  Synthetic
aataattcggttcaacaat

SEQ ID NO: 150 - DNA, 19 bp, Artificial Sequence
  Synthetic
tataattcggttcaacaat

SEQ ID NO: 151 - DNA, 19 bp, Artificial Sequence
  Synthetic
aataaaacgattgaacaat

SEQ ID NO: 152 - DNA, 19 bp, Artificial Sequence
  Synthetic
aggagtacgattgtaccaa

SEQ ID NO: 153 - DNA, 19 bp, Artificial Sequence
  Synthetic
aataaaacggttaaacaat

SEQ ID NO: 154 - DNA, 19 bp, Artificial Sequence
  Synthetic
aataaaacgattcaacaat

SEQ ID NO: 155 - DNA, 19 bp, Artificial Sequence
  Synthetic
aagaattcggttaaacaat

SEQ ID NO: 156 - DNA, 26 bp, Artificial Sequence
  Synthetic
tgaaccgaattatatattgttcaacc

SEQ ID NO: 157 - DNA, 23 bp, Artificial Sequence
  Synthetic
tggcaaaatcggttacggttgag

SEQ ID NO: 158 - DNA, 105 bp, Artificial Sequence
  Synthetic
ttattaattgttgaaccgaattatatattgttgaaccgaattattcctccacacccgcttacgcagggcatccatttattactcaaccgtaaccgattttgccag

SEQ ID NO: 159 - DNA, 105 bp, Artificial Sequence
  Synthetic
ctggcaaaatcggttacggttgagtaataaatggatgccctgcgtaagcgggtgtggaggaataattcggttcaacaatatataattcggttcaacaattaataa

SEQ ID NO: 160 - DNA, 105 bp, Artificial Sequence; identical to SEQ ID NO: 158
  Synthetic

SEQ ID NO: 161 - DNA, 104 bp, Artificial Sequence
  Synthetic
ttattattgttgaaccgaattatatattgttgaaccgaattattcctccacacccgcttacgcagggcatccatttattactcaaccgtaaccgattttgccag

SEQ ID NO: 162 - DNA, 95 bp, Artificial Sequence
  Synthetic
ttgaaccgaattatatattgttgaaccgaattattcctccacacccgcttacgcagggcatccatttattactcaaccgtaaccgattttgccag

SEQ ID NO: 163 - DNA, 37 bp, Artificial Sequence; identical to SEQ ID NO: 66
  Synthetic

SEQ ID NO: 164 - DNA, 45 bp, Artificial Sequence
  Synthetic
atgccgtcgttacttcctaaagccagcattgtaccatcggggcta

SEQ ID NO: 165 - DNA, 36 bp, Artificial Sequence; identical to SEQ ID NO: 75
  Synthetic

SEQ ID NO: 166 - DNA, 16 bp, Artificial Sequence
  Synthetic
aggcattacacaatac

SEQ ID NO: 167 - DNA, 47 bp, Artificial Sequence
  Synthetic
atgagccagatcaccatccaggccagactgatcagcttcgagagcaa

SEQ ID NO: 168 - DNA, 21 bp, Artificial Sequence
  Synthetic
cgcaaatgggcggtaggcgtg

SEQ ID NO: 169 - DNA, 46 bp, Artificial Sequence
  Synthetic
ctaccggactcagatcgccaccatgatcgcccctctgatcctgtac

SEQ ID NO: 170 - DNA, 21 bp, Artificial Sequence
  Synthetic
catggtggcgatctgagtccg

SEQ ID NO: 171 - DNA, 19 bp, Artificial Sequence
  Synthetic
ggaggatctggcggaggcg

SEQ ID NO: 172 - DNA, 20 bp, Artificial Sequence
  Synthetic
tgactagcataaccccttgg

SEQ ID NO: 173 - DNA, 45 bp, Artificial Sequence
  Synthetic
cagagccgcctccgccagatcctccgatggggctctgcaccattg

SEQ ID NO: 174 - DNA, 47 bp, Artificial Sequence
  Synthetic
taggcagcctgcacctgaggagtgcgccccaaggggttatgctagtc

SEQ ID NO: 175 - DNA, 1000 bp, Artificial Sequence
  Synthetic
ttttggcaccaaaatcaacgggactttccaaaatgtcgtaacaactccgccccattgacgcaaatgggcggtaggcgtgtacggtgggaggtctatataagcagagctggtttagtgaaccgtcagatccgctagcgctaccggactcagatcgccaccatgatcgcccctctgatcctgtacctggacgtgcccttcaccaccttcagagagtctcacgccagagagatgggcaagacataccccgttcctccaccagccacagtgtacggcatgctgctgtctctcgtgggcgagacaaacgtgtacagacactgcggcgtggaactggccattgccatgctgagcagccccaagaagtcccggatcctgcggcagatgcggagattcaagaacgccgacttctctcaccccgagaacgtgatcccttgctaccaagagatcctgagcaacctgaagtgcctgatctgggtccgaagcgacgaggaaaagatccagcctagcctgagagagcggatccagctggcctttgatcaccctgaactcgtcagaagattcggctgcctgttcctgggcgagagcgaccagctgatcaagaccatcaagctggccagagaggactacctggaaggcgttagacagtgggccatccgggacaacagaggcagactgacactgccctattgggtcgaccacgtgggcagcagaaatacccggttcctgagataccggatcgaggaaatggaccggctgagccctcctgacctggcttggacaatggtgcagagccccatcggaggatctggcggaggcggctctggcggcggtggaagcggaggacctaagaagaagagaaaagtctaccccgacgacgtgccagactacgcctgactagcataaccccttggggcgcactcctcaggtgcaggctgcctatcagaaggtggtggctggtgtggccaatgccctggctcacaaataccactgagatctttttccc

SEQ ID NO: 176 - DNA, 1000 bp, Artificial Sequence
  Synthetic
gggaaaaagatctcagtggtatttgtgagccagggcattggccacaccagccaccaccttctgataggcagcctgcacctgaggagtgcgccccaaggggttatgctagtcaggcgtagtctggcacgtcgtaggggtagacttttctcttcttcttaggtcctccgcttccaccgccgccagagccgcctccgccagatcctccgatggggctctgcaccattgtccaagccaggtcaggagggctcagccggtccatttcctcgatccggtatctcaggaaccgggtatttctgctgcccacgtggtcgacccaatagggcagtgtcagtctgcctctgttgtcccggatggcccactgtctaacgccttccaggtagtcctctctggccagcttgatggtcttgatcagctggtcgctctcgcccaggaacaggcagccgaatcttctgacgagttcagggtgatcaaaggccagctggatccgctctctcaggctaggctggatcttttcctcgtcgcttcggacccagatcaggcacttcaggttgctcaggatctcttggtagcaagggatcacgttctcggggtgagagaagtcggcgttcttgaatctccgcatctgccgcaggatccgggacttcttggggctgctcagcatggcaatggccagttccacgccgcagtgtctgtacacgtttgtctcgcccacgagagacagcagcatgccgtacactgtggctggtggaggaacggggtatgtcttgcccatctctctggcgtgagactctctgaaggtggtgaagggcacgtccaggtacaggatcagaggggcgatcatggtggcgatctgagtccggtagcgctagcggatctgacggttcactaaaccagctctgcttatatagacctcccaccgtacacgcctaccgcccatttgcgtcaatggggcggagttgttacgacattttggaaagtcccgttgattttggtgccaaaa

SEQ ID NO: 177 - DNA, 47 bp, Artificial Sequence; identical to SEQ ID NO: 167
  Synthetic

SEQ ID NO: 178 - protein, 243 aa, Artificial Sequence; identical to SEQ ID NO: 83
  Synthetic

SEQ ID NO: 179 - DNA, 47 bp, Artificial Sequence; identical to SEQ ID NO: 167
  Synthetic

SEQ ID NO: 180 - DNA, 42 bp, Artificial Sequence
  Synthetic
ccggactcagatcgccaccatgaccgccatcctgatccagag

SEQ ID NO: 181 - DNA, 21 bp, Artificial Sequence
  Synthetic
catggtggcgatctgagtccg

SEQ ID NO: 182 - DNA, 19 bp, Artificial Sequence
  Synthetic
ggaggatctggcggaggcg

SEQ ID NO: 183 - DNA, 51 bp, Artificial Sequence
  Synthetic
cagagccgcctccgccagatcctccggtttcctcttcctctttggatctgg

SEQ ID NO: 184 - DNA, 20 bp, Artificial Sequence
  Synthetic
tgactagcataaccccttgg

SEQ ID NO: 185 - DNA, 47 bp, Artificial Sequence; identical to SEQ ID NO: 167
  Synthetic

SEQ ID NO: 186 - DNA, 763 bp, Artificial Sequence
  Synthetic
ccggactcagatcgccaccatgaccgccatcctgatccagagcgaggaatacgtggacctgaccttcaagctgagaggcgcccctattcctctggacaacggctacctgacatacgccgctctgagcagaatctgccctcctctgcacgaactgaagtccatcggcattcaccctatcgccggcattcccaccagaaacaacctgctggaactgacagcccagagccggctgaagatcagaatctaccaccagcagatccctctgatctacccctacctggccggacaggcctttcacatcggccagaacttctaccagctggacatccccgactacaagcccctgatcagcagcgagagcgtgtacagcagactggtcatcatcaagggcttccaggacagcaccaacttcatcgaggccgtgcagcggcagatggacaatctgggaatccagggcaagatcgagctgctgaccagacaggatggcacccctcagagaaggcagctgaccatcaacaaagagggcaagcagttcaaagtgcgcggcttcggcgtgaagatctccgagctgaaccctgaggacagcctgacactgcaagagcaaggcatcggcggcaagcggaagatgatgtgcggcatctttgtgcccgccaccagatccaaagaggaagaggaaaccggaggatctggcggaggcggctctggcggcggtggaagcggaggacctaagaagaagagaaaagtctacccctacgacgtgcca

SEQ ID NO: 187 - DNA, 900 bp, Artificial Sequence
  Synthetic
cataatttttggcagagggaaaaagatctcagtggtatttgtgagccagggcattggccacaccagccaccaccttctgataggcagcctgcacctgaggagtgcgccccaaggggttatgctagtcaggcgtagtctggcacgtcgtaggggtagacttttctcttcttcttaggtcctccgcttccaccgccgccagagccgcctccgccagatcctccggtttcctcttcctctttggatctggtggcgggcacaaagatgccgcacatcatcttccgcttgccgccgatgccttgctcttgcagtgtcaggctgtcctcagggttcagctcggagatcttcacgccgaagccgcgcactttgaactgcttgccctctttgttgatggtcagctgccttctctgaggggtgccatcctgtctggtcagcagctcgatcttgccctggattcccagattgtccatctgccgctgcacggcctcgatgaagttggtgctgtcctggaagcccttgatgatgaccagtctgctgtacacgctctcgctgctgatcaggggcttgtagtcggggatgtccagctggtagaagttctggccgatgtgaaaggcctgtccggccaggtaggggtagatcagagggatctgctggtggtagattctgatcttcagccggctctgggctgtcagttccagcaggttgtttctggtgggaatgccggcgatagggtgaatgccgatggacttcagttcgtgcagaggagggcagattctgctcagagcggcgtatgtcaggtagccgttgtccagaggaataggggcgcctctcagcttgaaggtcaggtccacgtattcctcgctctggatcaggatggcggtcatggtggcgatctgagtccgg

SEQ ID NO: 188 - protein, 251 aa, Artificial Sequence; identical to SEQ ID NO: 84
  Synthetic

SEQ ID NO: 189 - DNA, 43 bp, Artificial Sequence
  Synthetic
atgagccagatcaccaggccagactgatcagcttcgagagcaa

SEQ ID NO: 190 - DNA, 48 bp, Artificial Sequence
  Synthetic
ctaccggactcagatcgccaccatgatgacccagaagaagaacgacag

SEQ ID NO: 191 - DNA, 21 bp, Artificial Sequence
  Synthetic
catggtggcgatctgagtccg

SEQ ID NO: 192 - skipped

SEQ ID NO: 193 - DNA, 19 bp, Artificial Sequence
  Synthetic
ggaggatctggcggaggcg

SEQ ID NO: 194 - DNA, 44 bp, Artificial Sequence
  Synthetic
cagagccgcctccgccagatcctcccttggattcctcgaggccc

SEQ ID NO: 195 - DNA, 18 bp, Artificial Sequence
  Synthetic
tgactagcataacccctt

SEQ ID NO: 196 - DNA, 17 bp, Artificial Sequence
  Synthetic
aaggggttatgctagtc

SEQ ID NO: 197 - DNA, 47 bp, Artificial Sequence; identical to SEQ ID NO: 167
  Synthetic

SEQ ID NO: 198 - DNA, 1121 bp, Artificial Sequence
  Synthetic
accgtcagatccgctagcgctaccggactcagatcgccaccatgatgacccagaagaagaacgacagcaacatccccaactactacctgtacggcaccgtgctgaccagatacggactggccagcctgaaccacgacatcagaagaggcaacaagaccatcctgcagaaaggctactggaacaacggcaagatccacagcttcgtgggcagcagcgccattagatgggccctgaggttctatctgcagaaacagggctacctggtcaacagagtgtgggacgaagaggaacacatcaacagactgaccagcgaggacttcgaccccgagaagttctacgacgacgacatcttcggcttcgccctgctggaaagcgccgagacagaggaagataccagcaccaccaagcggaagaagaagcagaccaagaccagcacacccaaccagagaatgggcgccctgggcatgaatatggccgtgtctctgaccccttacgatggcgccgtgaagctgggagccaagtctggcagagagaaggacagcaccagcctgcacttcaccgagtaccacgccaccagataccagtactacttcggcatcgacgccacacacctgaaggacttcagccggatcctgcctatgatcgacggcatcatgaacctgcctaaagtcggcggcagcagcaatatcttcaactaccctttctgccccgacagcctggtgttccagtggaccaatcacttcgccagctacatcagctactgcttcgagtactgcgaccccaagagcaaagaggccaagctgagccaagagttcatcgacgaggtggaatgcggccagatcgaccctagcaaactgtggatcggcggcaccatcgtgaaggacctgcagcagctggacaacttcgagagcagccctctgaacaaggcccacatctaccggaaccggaacgagatgatcgaggccctgaaaaccgtgatcaagcgcgacctgggcctcgaggaatccaagggaggatctggcggaggcggctctggcggcggtggaagcggaggacctaagaagaagagaaaagtctacccctacgacgtgccagactacgcctgactagcataacccctt

SEQ ID NO: 199 - DNA, 1121 bp, Artificial Sequence
  Synthetic
aaggggttatgctagtcaggcgtagtctggcacgtcgtaggggtagacttttctcttcttcttaggtcctccgcttccaccgccgccagagccgcctccgccagatcctcccttggattcctcgaggcccaggtcgcgcttgatcacggttttcagggcctcgatcatctcgttccggttccggtagatgtgggccttgttcagagggctgctctcgaagttgtccagctgctgcaggtccttcacgatggtgccgccgatccacagtttgctagggtcgatctggccgcattccacctcgtcgatgaactcttggctcagcttggcctctttgctcttggggtcgcagtactcgaagcagtagctgatgtagctggcgaagtgattggtccactggaacaccaggctgtcggggcagaaagggtagttgaagatattgctgctgccgccgactttaggcaggttcatgatgccgtcgatcataggcaggatccggctgaagtccttcaggtgtgtggcgtcgatgccgaagtagtactggtatctggtggcgtggtactcggtgaagtgcaggctggtgctgtccttctctctgccagacttggctcccagcttcacggcgccatcgtaaggggtcagagacacggccatattcatgcccagggcgcccattctctggttgggtgtgctggtcttggtctgcttcttcttccgcttggtggtgctggtatcttcctctgtctcggcgctttccagcagggcgaagccgaagatgtcgtcgtcgtagaacttctcggggtcgaagtcctcgctggtcagtctgttgatgtgttcctcttcgtcccacactctgttgaccaggtagccctgtttctgcagatagaacctcagggcccatctaatggcgctgctgcccacgaagctgtggatcttgccgttgttccagtagcctttctgcaggatggtcttgttgcctcttctgatgtcgtggttcaggctggccagtccgtatctggtcagcacggtgccgtacaggtagtagttggggatgttgctgtcgttcttcttctgggtcatcatggtggcgatctgagtccggtagcgctagcggatctgacggt

SEQ ID NO: 200 - protein, 354 aa, Artificial Sequence; identical to SEQ ID NO: 85
  Synthetic

SEQ ID NO: 201 - DNA, 47 bp, Artificial Sequence; identical to SEQ ID NO: 167
  Synthetic

SEQ ID NO: 202 - DNA, 46 bp, Artificial Sequence
  Synthetic
ctaccggactcagatcgccaccatgatcgtgtccacacagcccaag

SEQ ID NO: 203 - DNA, 21 bp, Artificial Sequence
  Synthetic
catggtggcgatctgagtccg

SEQ ID NO: 204 - DNA, 19 bp, Artificial Sequence
  Synthetic
ggaggatctggcggaggcg

SEQ ID NO: 205 - DNA, 19 bp, Artificial Sequence
  Synthetic
ggaggatctggcggaggcg

SEQ ID NO: 206 - DNA, 47 bp, Artificial Sequence
  Synthetic
cagagccgcctccgccagatcctccctcttcctcgctgtcgtcgttc

SEQ ID NO: 207 - DNA, 20 bp, Artificial Sequence
  Synthetic
tgactagcataaccccttgg

SEQ ID NO: 208 - DNA, 23 bp, Artificial Sequence
  Synthetic
cgccccaaggggttatgctagtc

SEQ ID NO: 209 - DNA, 47 bp, Artificial Sequence; identical to SEQ ID NO: 167
  Synthetic

SEQ ID NO: 210 - DNA, 1726 bp, Artificial Sequence
  Synthetic
ccgctagcgctaccggactcagatcgccaccatgatcgtgtccacacagcccaagatcagcctgtctctgcacgccgccgataccaccatcatgcacagagtgggcatgaccggcctgtacatgaccctgaagcggctggaaaagcagtaccctctgagcagacagagaggcggccacatcagctggtttctgaccgccgacaccatcgagctgttttgggagggcagcgactttatcgccctgagctggctgatcaacgagagctttcagctggacgacaccggcctgatccacctcgttggcctggacaacgaccggatcgacctgagacagaagatccacatccacgagggaatctgcggcgtgttcctgcggctgaacaagttttaccaggccggcgagatcatcaacaccgagctgagattcgaagagaagcaggtcgagtaccagtacaagagcctgacttggtacgcccaccagaccttcgccgagaagctgtgcgaagccgatacacagcagctgcggcacgactacatccagatcaccagctggctgtacctcggcggaattgtgcggcatgccagaacacagaacaccaccaagctggaagagaaacccgagtacgccctggctctgctgtttgtgcctgtcgtgtgccactactgcctgctgcacatccctagcgaggacctgaaagagcggaagccccacagatacctggtggtcatccccgagatcaaggacttcgaggatgccagccagagaagatggcggctgcagcagctggaaacaaagcagttccacgtgtccagcctgggcgaagccggcctgctgtactacagcctggatgacattcagcccgaggtggcctactaccaggcctgtcaagtgtggctgtacgaaaagaccaacaaggccagccggcagcggaccctgatgagcatcgaggaaatcaagatcgacaagaacatcctcatcacctaccagcaggtccagaagtactttaagaccaactaccagatcattaagtacaagcagatcttcatcaaagtgaaccccattcggagcctgatcgccgacaatctggtcaagggaatccactggtggtccaatttctgggagaagctggtcatcgaggacagcaaagagtacctgttcaaccagctgttcagcaaccgcgagggcttcatcatcatggccgagaacagcgaagaggacaagcagtatctgatctttatcaaggtgttccagcaggccatgaagggcaacttcgccaagatctacgccaagaccgaggaaggcaaggaccctcctatcaagaaaaaggtggaacggctgcgggccgagctgaactactgttacgatgagctgagcttcaaagaatacctgagcgacttcctcgtcagaggcggactgaacaaatacttcaacgagcaccaagaggaaatcgccctgctgatcaagaagtccccttggcaagagatcagaatctggtccctgctggccattgccagctacaagcccaaggacaagctgaccaaccgggacgatagcagcctgagcaacaaccagaaactggaagaagtgaacgacgacagcgaggaagagggaggatctggcggaggcggctctggcggcggtggaagcggaggacctaagaagaagagaaaagtctacccctacgacgtgccagactacgcctgactagcataaccccttggggcg

SEQ ID NO: 211 - DNA, 1726 bp, Artificial Sequence
  Synthetic
cgccccaaggggttatgctagtcaggcgtagtctggcacgtcgtaggggtagacttttctcttcttcttaggtcctccgcttccaccgccgccagagccgcctccgccagatcctccctcttcctcgctgtcgtcgttcacttcttccagtttctggttgttgctcaggctgctatcgtcccggttggtcagcttgtccttgggcttgtagctggcaatggccagcagggaccagattctgatctcttgccaaggggacttcttgatcagcagggcgatttcctcttggtgctcgttgaagtatttgttcagtccgcctctgacgaggaagtcgctcaggtattctttgaagctcagctcatcgtaacagtagttcagctcggcccgcagccgttccacctttttcttgataggagggtccttgccttcctcggtcttggcgtagatcttggcgaagttgcccttcatggcctgctggaacaccttgataaagatcagatactgcttgtcctcttcgctgttctcggccatgatgatgaagccctcgcggttgctgaacagctggttgaacaggtactctttgctgtcctcgatgaccagcttctcccagaaattggaccaccagtggattcccttgaccagattgtcggcgatcaggctccgaatggggttcactttgatgaagatctgcttgtacttaatgatctggtagttggtcttaaagtacttctggacctgctggtaggtgatgaggatgttcttgtcgatcttgatttcctcgatgctcatcagggtccgctgccggctggccttgttggtcttttcgtacagccacacttgacaggcctggtagtaggccacctcgggctgaatgtcatccaggctgtagtacagcaggccggcttcgcccaggctggacacgtggaactgctttgtttccagctgctgcagccgccatcttctctggctggcatcctcgaagtccttgatctcggggatgaccaccaggtatctgtggggcttccgctctttcaggtcctcgctagggatgtgcagcaggcagtagtggcacacgacaggcacaaacagcagagccagggcgtactcgggtttctcttccagcttggtggtgttctgtgttctggcatgccgcacaattccgccgaggtacagccagctggtgatctggatgtagtcgtgccgcagctgctgtgtatcggcttcgcacagcttctcggcgaaggtctggtgggcgtaccaagtcaggctcttgtactggtactcgacctgcttctcttcgaatctcagctcggtgttgatgatctcgccggcctggtaaaacttgttcagccgcaggaacacgccgcagattccctcgtggatgtggatcttctgtctcaggtcgatccggtcgttgtccaggccaacgaggtggatcaggccggtgtcgtccagctgaaagctctcgttgatcagccagctcagggcgataaagtcgctgccctcccaaaacagctcgatggtgtcggcggtcagaaaccagctgatgtggccgcctctctgtctgctcagagggtactgcttttccagccgcttcagggtcatgtacaggccggtcatgcccactctgtgcatgatggtggtatcggcggcgtgcagagacaggctgatcttgggctgtgtggacacgatcatggtggcgatctgagtccggtagcgctagcgg

SEQ ID NO: 212 - protein, 198 aa, Artificial Sequence
  Synthetic
MPHNSAEVQPAGDLDVVVPQLLCIGFAQLLGEGLVGVPSQALVLVLDLLLFESQLGVDDLAGLVKLVQPQEHAADSLVDVDLLSQVDPVVVQANEVDQAGVVQLKALVDQPAQGDKVAALPKQLDGVGGQKPADVAASLSAQRVLLFQPLQGHVQAGHAHSVHDGGIGGVQRQADLGLCGHDHGGDLSPVALADLTVH

SEQ ID NO: 213 - protein, 557 aa, Artificial Sequence; identical to SEQ ID NO: 86
  Synthetic

SEQ ID NO: 214 - DNA, 47 bp, Artificial Sequence; identical to SEQ ID NO: 167
  Synthetic

SEQ ID NO: 215 - DNA, 21 bp, Artificial Sequence
  Synthetic
cgcaaatgggcggtaggcgtg

SEQ ID NO: 216 - DNA, 49 bp, Artificial Sequence
  Synthetic
ccgctagcgctaccggactcagatcgccaccatgtacccctacgacgtg

SEQ ID NO: 217 - DNA, 46 bp, Artificial Sequence
  Synthetic
atctggcggaggtggaagcggaggaatcgcccctctgatcctgtac

SEQ ID NO: 218 - DNA, 20 bp, Artificial Sequence
  Synthetic
tcctccgcttccacctccgc

SEQ ID NO: 219 - DNA, 20 bp, Artificial Sequence
  Synthetic
ctagcataaccccttggggc

SEQ ID NO: 220 - DNA, 20 bp, Artificial Sequence
  Synthetic
tgactagcataaccccttgg

SEQ ID NO: 221 - DNA, 47 bp, Artificial Sequence; identical to SEQ ID NO: 167
  Synthetic

SEQ ID NO: 222 - DNA, 44 bp, Artificial Sequence
  Synthetic
agtgcgccccaaggggttatgctagtcagatggggctctgcacc

SEQ ID NO: 223 - DNA, 10 bp, Artificial Sequence
  Synthetic
gggaaaaaga

SEQ ID NO: 224 - DNA, 1000 bp, Artificial Sequence
  Synthetic
ttttggcaccaaaatcaacgggactttccaaaatgtcgtaacaactccgccccattgacgcaaatgggcggtaggcgtgtacggtgggaggtctatataagcagagctggtttagtgaaccgtcagatccgctagcgctaccggactcagatcgccaccatgtacccctacgacgtgccagactacgcccctaagaagaagagaaaagtcggcggctctggcggcggaggatctggcggaggtggaagcggaggaatcgcccctctgatcctgtacctggacgtgcccttcaccaccttcagagagtctcacgccagagagatgggcaagacataccccgttcctccaccagccacagtgtacggcatgctgctgtctctcgtgggcgagacaaacgtgtacagacactgcggcgtggaactggccattgccatgctgagcagccccaagaagtcccggatcctgcggcagatgcggagattcaagaacgccgacttctctcaccccgagaacgtgatcccttgctaccaagagatcctgagcaacctgaagtgcctgatctgggtccgaagcgacgaggaaaagatccagcctagcctgagagagcggatccagctggcctttgatcaccctgaactcgtcagaagattcggctgcctgttcctgggcgagagcgaccagctgatcaagaccatcaagctggccagagaggactacctggaaggcgttagacagtgggccatccgggacaacagaggcagactgacactgccctattgggtcgaccacgtgggcagcagaaatacccggttcctgagataccggatcgaggaaatggaccggctgagccctcctgacctggcttggacaatggtgcagagccccatctgactagcataaccccttggggcgcactcctcaggtgcaggctgcctatcagaaggtggtggctggtgtggccaatgccctggctcacaaataccactgagatctttttccc

SEQ ID NO: 225 - DNA, 1000 bp, Artificial Sequence
  Synthetic
gggaaaaagatctcagtggtatttgtgagccagggcattggccacaccagccaccaccttctgataggcagcctgcacctgaggagtgcgccccaaggggttatgctagtcagatggggctctgcaccattgtccaagccaggtcaggagggctcagccggtccatttcctcgatccggtatctcaggaaccgggtatttctgctgcccacgtggtcgacccaatagggcagtgtcagtctgcctctgttgtcccggatggcccactgtctaacgccttccaggtagtcctctctggccagcttgatggtcttgatcagctggtcgctctcgcccaggaacaggcagccgaatcttctgacgagttcagggtgatcaaaggccagctggatccgctctctcaggctaggctggatcttttcctcgtcgcttcggacccagatcaggcacttcaggttgctcaggatctcttggtagcaagggatcacgttctcggggtgagagaagtcggcgttcttgaatctccgcatctgccgcaggatccgggacttcttggggctgctcagcatggcaatggccagttccacgccgcagtgtctgtacacgtttgtctcgcccacgagagacagcagcatgccgtacactgtggctggtggaggaacggggtatgtcttgcccatctctctggcgtgagactctctgaaggtggtgaagggcacgtccaggtacaggatcagaggggcgattcctccgcttccacctccgccagatcctccgccgccagagccgccgacttttctcttcttcttaggggcgtagtctggcacgtcgtaggggtacatggtggcgatctgagtccggtagcgctagcggatctgacggttcactaaaccagctctgcttatatagacctcccaccgtacacgcctaccgcccatttgcgtcaatggggcggagttgttacgacattttggaaagtcccgttgattttggtgccaaaa

SEQ ID NO: 226 - protein, 243 aa, Artificial Sequence; identical to SEQ ID NO: 87
  Synthetic

SEQ ID NO: 227 - DNA, 47 bp, Artificial Sequence; identical to SEQ ID NO: 167
  Synthetic

SEQ ID NO: 228 - DNA, 21 bp, Artificial Sequence
  Synthetic
cgcaaatgggcggtaggcgtg

SEQ ID NO: 229 - DNA, 49 bp, Artificial Sequence; identical to SEQ ID NO: 216
  Synthetic

SEQ ID NO: 230 - DNA, 45 bp, Artificial Sequence
  Synthetic
atctggcggaggtggaagcggaggaaccgccatcctgatccagag

SEQ ID NO: 231 - DNA, 20 bp, Artificial Sequence
  Synthetic
tcctccgcttccacctccgc

SEQ ID NO: 232 - DNA, 20 bp, Artificial Sequence
  Synthetic
ctagcataaccccttggggc

SEQ ID NO: 233 - DNA, 20 bp, Artificial Sequence
  Synthetic
tgactagcataaccccttgg

SEQ ID NO: 234 - DNA, 47 bp, Artificial Sequence; identical to SEQ ID NO: 167
  Synthetic

SEQ ID NO: 235 - DNA, 51 bp, Artificial Sequence
  Synthetic
agtgcgccccaaggggttatgctagtcaggtttcctcttcctctttggatc

SEQ ID NO: 236 - DNA, 1000 bp, Artificial Sequence
  Synthetic
ttttggcaccaaaatcaacgggactttccaaaatgtcgtaacaactccgccccattgacgcaaatgggcggtaggcgtgtacggtgggaggtctatataagcagagctggtttagtgaaccgtcagatccgctagcgctaccggactcagatcgccaccatgtacccctacgacgtgccagactacgcccctaagaagaagagaaaagtcggcggctctggcggcggaggatctggcggaggtggaagcggaggaaccgccatcctgatccagagcgaggaatacgtggacctgaccttcaagctgagaggcgcccctattcctctggacaacggctacctgacatacgccgctctgagcagaatctgccctcctctgcacgaactgaagtccatcggcattcaccctatcgccggcattcccaccagaaacaacctgctggaactgacagcccagagccggctgaagatcagaatctaccaccagcagatccctctgatctacccctacctggccggacaggcctttcacatcggccagaacttctaccagctggacatccccgactacaagcccctgatcagcagcgagagcgtgtacagcagactggtcatcatcaagggcttccaggacagcaccaacttcatcgaggccgtgcagcggcagatggacaatctgggaatccagggcaagatcgagctgctgaccagacaggatggcacccctcagagaaggcagctgaccatcaacaaagagggcaagcagttcaaagtgcgcggcttcggcgtgaagatctccgagctgaaccctgaggacagcctgacactgcaagagcaaggcatcggcggcaagcggaagatgatgtgcggcatctttgtgcccgccaccagatccaaagaggaagaggaaacctgactagcataaccccttggggcgcactcctcaggtgcaggctgcctatcagaaggtggtggctggtgtggccaatgccctggctcac

SEQ ID NO: 237 - DNA, 1000 bp, Artificial Sequence
  Synthetic
gtgagccagggcattggccacaccagccaccaccttctgataggcagcctgcacctgaggagtgcgccccaaggggttatgctagtcaggtttcctcttcctctttggatctggtggcgggcacaaagatgccgcacatcatcttccgcttgccgccgatgccttgctcttgcagtgtcaggctgtcctcagggttcagctcggagatcttcacgccgaagccgcgcactttgaactgcttgccctctttgttgatggtcagctgccttctctgaggggtgccatcctgtctggtcagcagctcgatcttgccctggattcccagattgtccatctgccgctgcacggcctcgatgaagttggtgctgtcctggaagcccttgatgatgaccagtctgctgtacacgctctcgctgctgatcaggggcttgtagtcggggatgtccagctggtagaagttctggccgatgtgaaaggcctgtccggccaggtaggggtagatcagagggatctgctggtggtagattctgatcttcagccggctctgggctgtcagttccagcaggttgtttctggtgggaatgccggcgatagggtgaatgccgatggacttcagttcgtgcagaggagggcagattctgctcagagcggcgtatgtcaggtagccgttgtccagaggaataggggcgcctctcagcttgaaggtcaggtccacgtattcctcgctctggatcaggatggcggttcctccgcttccacctccgccagatcctccgccgccagagccgccgacttttctcttcttcttaggggcgtagtctggcacgtcgtaggggtacatggtggcgatctgagtccggtagcgctagcggatctgacggttcactaaaccagctctgcttatatagacctcccaccgtacacgcctaccgcccatttgcgtcaatggggcggagttgttacgacattttggaaagtcccgttgattttggtgccaaaa

SEQ ID NO: 238 - protein, 251 aa, Artificial Sequence; identical to SEQ ID NO: 88
  Synthetic

SEQ ID NO: 239 - DNA, 48 bp, Artificial Sequence
  Synthetic
atgagccagatcaccatcccaggccagactgatcagcttcgagagcaa

SEQ ID NO: 240 - DNA, 21 bp, Artificial Sequence
  Synthetic
cgcaaatgggcggtaggcgtg

SEQ ID NO: 241 - DNA, 49 bp, Artificial Sequence; identical to SEQ ID NO: 216
  Synthetic

SEQ ID NO: 242 - DNA, 48 bp, Artificial Sequence
  Synthetic
atctggcggaggtggaagcggaggaatgacccagaagaagaacgacag

SEQ ID NO: 243 - DNA, 20 bp, Artificial Sequence
  Synthetic
tcctccgcttccacctccgc

SEQ ID NO: 244 - DNA, 20 bp, Artificial Sequence
  Synthetic
ctagcataaccccttggggc

SEQ ID NO: 245 - DNA, 20 bp, Artificial Sequence
  Synthetic
tgactagcataaccccttgg

SEQ ID NO: 246 - DNA, 47 bp, Artificial Sequence; identical to SEQ ID NO: 167
  Synthetic

SEQ ID NO: 247 - DNA, 1320 bp, Artificial Sequence
  Synthetic
acaactccgccccattgacgcaaatgggcggtaggcgtgtacggtgggaggtctatataagcagagctggtttagtgaaccgtcagatccgctagcgctaccggactcagatcgccaccatgtacccctacgacgtgccagactacgcccctaagaagaagagaaaagtcggcggctctggcggcggaggatctggcggaggtggaagcggaggaatgacccagaagaagaacgacagcaacatccccaactactacctgtacggcaccgtgctgaccagatacggactggccagcctgaaccacgacatcagaagaggcaacaagaccatcctgcagaaaggctactggaacaacggcaagatccacagcttcgtgggcagcagcgccattagatgggccctgaggttctatctgcagaaacagggctacctggtcaacagagtgtgggacgaagaggaacacatcaacagactgaccagcgaggacttcgaccccgagaagttctacgacgacgacatcttcggcttcgccctgctggaaagcgccgagacagaggaagataccagcaccaccaagcggaagaagaagcagaccaagaccagcacacccaaccagagaatgggcgccctgggcatgaatatggccgtgtctctgaccccttacgatggcgccgtgaagctgggagccaagtctggcagagagaaggacagcaccagcctgcacttcaccgagtaccacgccaccagataccagtactacttcggcatcgacgccacacacctgaaggacttcagccggatcctgcctatgatcgacggcatcatgaacctgcctaaagtcggcggcagcagcaatatcttcaactaccctttctgccccgacagcctggtgttccagtggaccaatcacttcgccagctacatcagctactgcttcgagtactgcgaccccaagagcaaagaggccaagctgagccaagagttcatcgacgaggtggaatgcggccagatcgaccctagcaaactgtggatcggcggcaccatcgtgaaggacctgcagcagctggacaacttcgagagcagccctctgaacaaggcccacatctaccggaaccggaacgagatgatcgaggccctgaaaaccgtgatcaagcgcgacctgggcctcgaggaatccaagtaactagcataaccccttggggcgcactcctcaggtgcaggctgcctatcagaaggtggtggctggtgtggccaatgccctggctcacaaataccactgagatctttttccctctgccaaaaattatggggacatcatg

SEQ ID NO: 248 - DNA, 1320 bp, Artificial Sequence
  Synthetic
catgatgtccccataatttttggcagagggaaaaagatctcagtggtatttgtgagccagggcattggccacaccagccaccaccttctgataggcagcctgcacctgaggagtgcgccccaaggggttatgctagttacttggattcctcgaggcccaggtcgcgcttgatcacggttttcagggcctcgatcatctcgttccggttccggtagatgtgggccttgttcagagggctgctctcgaagttgtccagctgctgcaggtccttcacgatggtgccgccgatccacagtttgctagggtcgatctggccgcattccacctcgtcgatgaactcttggctcagcttggcctctttgctcttggggtcgcagtactcgaagcagtagctgatgtagctggcgaagtgattggtccactggaacaccaggctgtcggggcagaaagggtagttgaagatattgctgctgccgccgactttaggcaggttcatgatgccgtcgatcataggcaggatccggctgaagtccttcaggtgtgtggcgtcgatgccgaagtagtactggtatctggtggcgtggtactcggtgaagtgcaggctggtgctgtccttctctctgccagacttggctcccagcttcacggcgccatcgtaaggggtcagagacacggccatattcatgcccagggcgcccattctctggttgggtgtgctggtcttggtctgcttcttcttccgcttggtggtgctggtatcttcctctgtctcggcgctttccagcagggcgaagccgaagatgtcgtcgtcgtagaacttctcggggtcgaagtcctcgctggtcagtctgttgatgtgttcctcttcgtcccacactctgttgaccaggtagccctgtttctgcagatagaacctcagggcccatctaatggcgctgctgcccacgaagctgtggatcttgccgttgttccagtagcctttctgcaggatggtcttgttgcctcttctgatgtcgtggttcaggctggccagtccgtatctggtcagcacggtgccgtacaggtagtagttggggatgttgctgtcgttcttcttctgggtcattcctccgcttccacctccgccagatcctccgccgccagagccgccgacttttctcttcttcttaggggcgtagtctggcacgtcgtaggggtacatggtggcgatctgagtccggtagcgctagcggatctgacggttcactaaaccagctctgcttatatagacctcccaccgtacacgcctaccgcccatttgcgtcaatggggcggagttgt

SEQ ID NO: 249 - protein, 354 aa, Artificial Sequence; identical to SEQ ID NO: 89
  Synthetic

SEQ ID NO: 250 - DNA, 47 bp, Artificial Sequence; identical to SEQ ID NO: 167
  Synthetic

SEQ ID NO: 251 - DNA, 40 bp, Artificial Sequence
  Synthetic
ctaccggactcagatcgccaccatgtacccctacgacgtg

SEQ ID NO: 252 - DNA, 46 bp, Artificial Sequence
  Synthetic
atctggcggaggtggaagcggaggaatcgtgtccacacagcccaag

SEQ ID NO: 253 - DNA, 20 bp, Artificial Sequence
  Synthetic
tcctccgcttccacctccgc

SEQ ID NO: 254 - DNA, 18 bp, Artificial Sequence
  Synthetic
ctagcataaccccttggg

SEQ ID NO: 255 - DNA, 20 bp, Artificial Sequence
  Synthetic
tgactagcataaccccttgg

SEQ ID NO: 256 - DNA, 20 bp, Artificial Sequence
  Synthetic
atgagccagatcaccatcca

SEQ ID NO: 257 - DNA, 40 bp, Artificial Sequence
  Synthetic
cccaaggggttatgctagtcactcttcctcgctgtcgtcg

SEQ ID NO: 258 - DNA, 1714 bp, Artificial Sequence
  Synthetic
ctaccggactcagatcgccaccatgtacccctacgacgtgccagactacgcccctaagaagaagagaaaagtcggcggctctggcggcggaggatctggcggaggtggaagcggaggaatcgtgtccacacagcccaagatcagcctgtctctgcacgccgccgataccaccatcatgcacagagtgggcatgaccggcctgtacatgaccctgaagcggctggaaaagcagtaccctctgagcagacagagaggcggccacatcagctggtttctgaccgccgacaccatcgagctgttttgggagggcagcgactttatcgccctgagctggctgatcaacgagagctttcagctggacgacaccggcctgatccacctcgttggcctggacaacgaccggatcgacctgagacagaagatccacatccacgagggaatctgcggcgtgttcctgcggctgaacaagttttaccaggccggcgagatcatcaacaccgagctgagattcgaagagaagcaggtcgagtaccagtacaagagcctgacttggtacgcccaccagaccttcgccgagaagctgtgcgaagccgatacacagcagctgcggcacgactacatccagatcaccagctggctgtacctcggcggaattgtgcggcatgccagaacacagaacaccaccaagctggaagagaaacccgagtacgccctggctctgctgtttgtgcctgtcgtgtgccactactgcctgctgcacatccctagcgaggacctgaaagagcggaagccccacagatacctggtggtcatccccgagatcaaggacttcgaggatgccagccagagaagatggcggctgcagcagctggaaacaaagcagttccacgtgtccagcctgggcgaagccggcctgctgtactacagcctggatgacattcagcccgaggtggcctactaccaggcctgtcaagtgtggctgtacgaaaagaccaacaaggccagccggcagcggaccctgatgagcatcgaggaaatcaagatcgacaagaacatcctcatcacctaccagcaggtccagaagtactttaagaccaactaccagatcattaagtacaagcagatcttcatcaaagtgaaccccattcggagcctgatcgccgacaatctggtcaagggaatccactggtggtccaatttctgggagaagctggtcatcgaggacagcaaagagtacctgttcaaccagctgttcagcaaccgcgagggcttcatcatcatggccgagaacagcgaagaggacaagcagtatctgatctttatcaaggtgttccagcaggccatgaagggcaacttcgccaagatctacgccaagaccgaggaaggcaaggaccctcctatcaagaaaaaggtggaacggctgcgggccgagctgaactactgttacgatgagctgagcttcaaagaatacctgagcgacttcctcgtcagaggcggactgaacaaatacttcaacgagcaccaagaggaaatcgccctgctgatcaagaagtccccttggcaagagatcagaatctggtccctgctggccattgccagctacaagcccaaggacaagctgaccaaccgggacgatagcagcctgagcaacaaccagaaactggaagaagtgaacgacgacagcgaggaagagtgactagcataaccccttggg

SEQ ID NO: 259 - DNA, 1714 bp, Artificial Sequence
  Synthetic
cccaaggggttatgctagtcactcttcctcgctgtcgtcgttcacttcttccagtttctggttgttgctcaggctgctatcgtcccggttggtcagcttgtccttgggcttgtagctggcaatggccagcagggaccagattctgatctcttgccaaggggacttcttgatcagcagggcgatttcctcttggtgctcgttgaagtatttgttcagtccgcctctgacgaggaagtcgctcaggtattctttgaagctcagctcatcgtaacagtagttcagctcggcccgcagccgttccacctttttcttgataggagggtccttgccttcctcggtcttggcgtagatcttggcgaagttgcccttcatggcctgctggaacaccttgataaagatcagatactgcttgtcctcttcgctgttctcggccatgatgatgaagccctcgcggttgctgaacagctggttgaacaggtactctttgctgtcctcgatgaccagcttctcccagaaattggaccaccagtggattcccttgaccagattgtcggcgatcaggctccgaatggggttcactttgatgaagatctgcttgtacttaatgatctggtagttggtcttaaagtacttctggacctgctggtaggtgatgaggatgttcttgtcgatcttgatttcctcgatgctcatcagggtccgctgccggctggccttgttggtcttttcgtacagccacacttgacaggcctggtagtaggccacctcgggctgaatgtcatccaggctgtagtacagcaggccggcttcgcccaggctggacacgtggaactgctttgtttccagctgctgcagccgccatcttctctggctggcatcctcgaagtccttgatctcggggatgaccaccaggtatctgtggggcttccgctctttcaggtcctcgctagggatgtgcagcaggcagtagtggcacacgacaggcacaaacagcagagccagggcgtactcgggtttctcttccagcttggtggtgttctgtgttctggcatgccgcacaattccgccgaggtacagccagctggtgatctggatgtagtcgtgccgcagctgctgtgtatcggcttcgcacagcttctcggcgaaggtctggtgggcgtaccaagtcaggctcttgtactggtactcgacctgcttctcttcgaatctcagctcggtgttgatgatctcgccggcctggtaaaacttgttcagccgcaggaacacgccgcagattccctcgtggatgtggatcttctgtctcaggtcgatccggtcgttgtccaggccaacgaggtggatcaggccggtgtcgtccagctgaaagctctcgttgatcagccagctcagggcgataaagtcgctgccctcccaaaacagctcgatggtgtcggcggtcagaaaccagctgatgtggccgcctctctgtctgctcagagggtactgcttttccagccgcttcagggtcatgtacaggccggtcatgcccactctgtgcatgatggtggtatcggcggcgtgcagagacaggctgatcttgggctgtgtggacacgattcctccgcttccacctccgccagatcctccgccgccagagccgccgacttttctcttcttcttaggggcgtagtctggcacgtcgtaggggtacatggtggcgatctgagtccggtag

SEQ ID NO: 260 - protein, 557 aa, Artificial Sequence; identical to SEQ ID NO: 90
  Synthetic

SEQ ID NO: 261 - protein, 221 aa, Artificial Sequence
  Synthetic
MPHNSAEVQPAGDLDVVVPQLLCIGFAQLLGEGLVGVPSQALVLVLDLLLFESQLGVDDLAGLVKLVQPQEHAADSLVDVDLLSQVDPVVVQANEVDQAGVVQLKALVDQPAQGDKVAALPKQLDGVGGQKPADVAASLSAQRVLLFQPLQGHVQAGHAHSVHDGGIGGVQRQADLGLCGHDSSASTSARSSAARAADFSLLLRGVVWHVVGVHGGDLSPV

SEQ ID NO: 262 - DNA, 47 bp, Artificial Sequence; identical to SEQ ID NO: 167
  Synthetic

SEQ ID NO: 263 - DNA, 47 bp, Artificial Sequence; identical to SEQ ID NO: 167
  Synthetic

SEQ ID NO: 264 - DNA, 21 bp, Artificial Sequence
  Synthetic
cgcaaatgggcggtaggcgtg

SEQ ID NO: 265 - DNA, 49 bp, Artificial Sequence; identical to SEQ ID NO: 216
  Synthetic

SEQ ID NO: 266 - DNA, 45 bp, Artificial Sequence
  Synthetic
atctggcggaggtggaagcggaggaaccatctacagcgagcactg

SEQ ID NO: 267 - DNA, 20 bp, Artificial Sequence
  Synthetic
tcctccgcttccacctccgc

SEQ ID NO: 268 - DNA, 47 bp, Artificial Sequence; identical to SEQ ID NO: 167
  Synthetic

SEQ ID NO: 269 - DNA, 20 bp, Artificial Sequence
  Synthetic
ctagcataaccccttggggc

SEQ ID NO: 270 - DNA, 47 bp, Artificial Sequence; identical to SEQ ID NO: 167
  Synthetic

SEQ ID NO: 271 - DNA, 50 bp, Artificial Sequence
  Synthetic
agtgcgccccaaggggttatgctagtcacagtttcagttccagggagaag

SEQ ID NO: 272 - DNA, 20 bp, Artificial Sequence
  Synthetic
ttttggcagagggaaaaaga

SEQ ID NO: 273 - DNA, 1400 bp, Artificial Sequence
  Synthetic
ttttggcaccaaaatcaacgggactttccaaaatgtcgtaacaactccgccccattgacgcaaatgggcggtaggcgtgtacggtgggaggtctatataagcagagctggtttagtgaaccgtcagatccgctagcgctaccggactcagatcgccaccatgtacccctacgacgtgccagactacgcccctaagaagaagagaaaagtcggcggctctggcggcggaggatctggcggaggtggaagcggaggaaccatctacagcgagcactggtccctgaatcctctggaaatccctcagcggagccggctgtttagcctggaacctgtggctgtgggcacaccttatgccgagagcctgagcagctacctgcacagactggcccaggctcactgtctgacaagcgagaagctggtcatgggcgagatcgcccctctgatcctgaaggacgaggacaagagcgagctgctgagcaagaacctgagccatctgctgggcaacagcgacgccaagcctgccatcaatggcatgagagagatgaccgagaagctcgtgaccgtgctggaagaactgaccatgcggcaggacctgcggtttctgacactgctgtcttggaagggcatgatctacgacaagggcctgttccgcaactacagagcctggtgtccttgctgctgcgaggaatggatgcagaagaacaagacaatctacgagcccctgagctggtccttcaaggacgtggaattctgcctgatccacaagcagcggctgatcgaggaatgcagccattgtggcgctagactgcccgtgatggccagactttctcctgccggcttctgcagcagatgctatggctggctgggccaagagatcaagggcgaagaggaaatcgagaagtaccgcgtgaacatccagggcatctccgagctgattgccctgacacctcagctgggctacaagcccattcctatcgagctgacccggaaactgcagctgatcctgctggtgttcgagcaggccatcggcaaggatgtgaagctgctgggagatctcggcggcatcatggaaagcctgagaatcgccagcaccaccaaccagagccagccttaccacctggtcaagctgatcatccccgtgtgcgagaaggccaagatcagcgtgttccagctgttcggcagcgacttcaaagagctgggcaagatcctgtttggcaacttctccctggaactgaaactgtgactagcataaccccttggggcgcactcctcaggtgcaggctgcctatcagaaggtggtggctggtgtggccaatgccctggctcacaaataccactgagatctttttccctctgccaaaaattatggggacatcatgaagccccttgagcatctgactt

SEQ ID NO: 274 - DNA, 1400 bp, Artificial Sequence
  Synthetic
aagtcagatgctcaaggggcttcatgatgtccccataatttttggcagagggaaaaagatctcagtggtatttgtgagccagggcattggccacaccagccaccaccttctgataggcagcctgcacctgaggagtgcgccccaaggggttatgctagtcacagtttcagttccagggagaagttgccaaacaggatcttgcccagctctttgaagtcgctgccgaacagctggaacacgctgatcttggccttctcgcacacggggatgatcagcttgaccaggtggtaaggctggctctggttggtggtgctggcgattctcaggctttccatgatgccgccgagatctcccagcagcttcacatccttgccgatggcctgctcgaacaccagcaggatcagctgcagtttccgggtcagctcgataggaatgggcttgtagcccagctgaggtgtcagggcaatcagctcggagatgccctggatgttcacgcggtacttctcgatttcctcttcgcccttgatctcttggcccagccagccatagcatctgctgcagaagccggcaggagaaagtctggccatcacgggcagtctagcgccacaatggctgcattcctcgatcagccgctgcttgtggatcaggcagaattccacgtccttgaaggaccagctcaggggctcgtagattgtcttgttcttctgcatccattcctcgcagcagcaaggacaccaggctctgtagttgcggaacaggcccttgtcgtagatcatgcccttccaagacagcagtgtcagaaaccgcaggtcctgccgcatggtcagttcttccagcacggtcacgagcttctcggtcatctctctcatgccattgatggcaggcttggcgtcgctgttgcccagcagatggctcaggttcttgctcagcagctcgctcttgtcctcgtccttcaggatcagaggggcgatctcgcccatgaccagcttctcgcttgtcagacagtgagcctgggccagtctgtgcaggtagctgctcaggctctcggcataaggtgtgcccacagccacaggttccaggctaaacagccggctccgctgagggatttccagaggattcagggaccagtgctcgctgtagatggttcctccgcttccacctccgccagatcctccgccgccagagccgccgacttttctcttcttcttaggggcgtagtctggcacgtcgtaggggtacatggtggcgatctgagtccggtagcgctagcggatctgacggttcactaaaccagctctgcttatatagacctcccaccgtacacgcctaccgcccatttgcgtcaatggggcggagttgttacgacattttggaaagtcccgttgattttggtgccaaaa

SEQ ID NO: 275 - protein, 360 aa, Artificial Sequence; identical to SEQ ID NO: 91
  Synthetic

SEQ ID NO: 276 - protein, 226 aa, Artificial Sequence
  Synthetic
MAAFLDQPLLVDQAEFHVLEGPAQGLVDCLVLLHPFLAAARTPGSVVAEQALVVDHALPRQQCQKPQVLPHGQFFQHGHELLGHLSHAIDGRLGVAVAQQMAQVLAQQLALVLVLQDQRGDLAHDQLLACQTVSLGQSVQVAAQALGIRCAHSHRFQAKQPAPLRDFQRIQGPVLAVDGSSASTSARSSAARAADFSLLLRGVVWHVVGVHGGDLSPVALADLTVH

SEQ ID NO: 277 - protein, 176 aa, Artificial Sequence
  Synthetic
MLWLAGPRDQGRRGNREVPREHPGHLRADCPDTSAGLQAHSYRADPETAADPAGVRAGHRQGCEAAGRSRRHHGKPENRQHHQPEPALPPGQADHPRVREGQDQRVPAVRQRLQRAGQDPVWQLLPGTETVTSITPWGALLRCRLPIRRWWLVWPMPWLTNTTEIFFPLPKIMGTS

SEQ ID NO: 278 - DNA, 47 bp, Artificial Sequence; identical to SEQ ID NO: 167
  Synthetic

SEQ ID NO: 279 - DNA, 47 bp, Artificial Sequence; identical to SEQ ID NO: 167
  Synthetic

SEQ ID NO: 280 - DNA, 46 bp, Artificial Sequence
  Synthetic
ctagcgctaccggactcagatcgccaccatgtacccctacgacgtg

SEQ ID NO: 281 - DNA, 45 bp, Artificial Sequence
  Synthetic
atctggcggaggtggaagcggaggactggcctctgtgctggaaac

SEQ ID NO: 282 - DNA, 20 bp, Artificial Sequence
  Synthetic
tcctccgcttccacctccgc

SEQ ID NO: 283 - DNA, 47 bp, Artificial Sequence; identical to SEQ ID NO: 167
  Synthetic

SEQ ID NO: 284 - DNA, 20 bp, Artificial Sequence
  Synthetic
ctagcataaccccttggggc

SEQ ID NO: 285 - DNA, 47 bp, Artificial Sequence; identical to SEQ ID NO: 167
  Synthetic

SEQ ID NO: 286 - DNA, 48 bp, Artificial Sequence
  Synthetic
agtgcgccccaaggggttatgctagtcacaggccaaattctctccgag

SEQ ID NO: 287 - DNA, 1536 bp, Artificial Sequence
  Synthetic
ctaccggactcagatcgccaccatgtacccctacgacgtgccagactacgcccctaagaagaagagaaaagtcggcggctctggcggcggaggatctggcggaggtggaagcggaggactggcctctgtgctggaaacctacgagagctggaacctgaagaagcctctgatccctcagcggagcagactgtaccagcctcagcctgttggcatcggcaccccttacatcgagagcctgaccggctacatcaccagaatcgccgaactgcatggcgtgctgcctggggtgctgatgaccagagaaatcgcccctctggtcaacaagatctacttccagaacggcgccaaccggggcttcagagagatcttcaacagatctcaggccctgaacggcatgggagagatggccgctgatctggtgcaggtcctgcagaagctgaccctgagggacgacctgagattcctgaccatgctgttctggtccaacatcctgacacctcggaacctgttccggaccagaaaggcctggtgtcccatctgctaccaagagcggcaccagaacggactggtggtgtacgaacagctgctgtggaccatcaacctgatcaccatctgtccccagcaccagaaacctctggtggaactgtgccctcactgcaaccacgagagccctctgctgaattggagaagcagacccggctactgcagcaagtgtggcgaatggctgggcgccaatcagtgcctgaaaaccttcacagatggcgagggcagcatcaaactgcagctggaatggcagtactggaccgccaatgttgtgggcgagctgatcctggccagccagtgttttgagagcgcccctagcaaagagaacatcaccaagagcctgaacatcgtgatcgacaaggtggccgagaacaacgccgctgccttctctagactgatcggcgtgcccaagaacagcctgtggatgtggcagagcaccaagacactgcccgagctgaacaccctgctgaagatctgctacgagctggaaatcagcctggtcgagtttctgacccctaagaacctgattaccaagtccttcaccaagatcagccagaagcacctccagctgagcagaacccctagagtgtcccctaagagcttcgaccagtaccaagtgaaggacgccctgctggccatcctggccggaaatgaagaacctcctccaaccatggaagaagtgggcaagagactgggccaccacaaccggacaatcagcagacacttccccgatctgtgcagcgccatcagcgccaagtgccggaattacaacaaggcctgccggctgaagtccatcgagaagctgtgtagcgaagtgcgcgagatcgtgctgagcctgaatgctcagggcgtgtaccctacagagggcagagtgtgcgaactgatgcccaatcctggctgcttccggtacaagcaagtgcgggctgccttcaacgacgctcggagagaatttggcctgtgactagcataaccccttggggcgcactcctcagg

SEQ ID NO: 288 - DNA, 1536 bp, Artificial Sequence
  Synthetic
cctgaggagtgcgccccaaggggttatgctagtcacaggccaaattctctccgagcgtcgttgaaggcagcccgcacttgcttgtaccggaagcagccaggattgggcatcagttcgcacactctgccctctgtagggtacacgccctgagcattcaggctcagcacgatctcgcgcacttcgctacacagcttctcgatggacttcagccggcaggccttgttgtaattccggcacttggcgctgatggcgctgcacagatcggggaagtgtctgctgattgtccggttgtggtggcccagtctcttgcccacttcttccatggttggaggaggttcttcatttccggccaggatggccagcagggcgtccttcacttggtactggtcgaagctcttaggggacactctaggggttctgctcagctggaggtgcttctggctgatcttggtgaaggacttggtaatcaggttcttaggggtcagaaactcgaccaggctgatttccagctcgtagcagatcttcagcagggtgttcagctcgggcagtgtcttggtgctctgccacatccacaggctgttcttgggcacgccgatcagtctagagaaggcagcggcgttgttctcggccaccttgtcgatcacgatgttcaggctcttggtgatgttctctttgctaggggcgctctcaaaacactggctggccaggatcagctcgcccacaacattggcggtccagtactgccattccagctgcagtttgatgctgccctcgccatctgtgaaggttttcaggcactgattggcgcccagccattcgccacacttgctgcagtagccgggtctgcttctccaattcagcagagggctctcgtggttgcagtgagggcacagttccaccagaggtttctggtgctggggacagatggtgatcaggttgatggtccacagcagctgttcgtacaccaccagtccgttctggtgccgctcttggtagcagatgggacaccaggcctttctggtccggaacaggttccgaggtgtcaggatgttggaccagaacagcatggtcaggaatctcaggtcgtccctcagggtcagcttctgcaggacctgcaccagatcagcggccatctctcccatgccgttcagggcctgagatctgttgaagatctctctgaagccccggttggcgccgttctggaagtagatcttgttgaccagaggggcgatttctctggtcatcagcaccccaggcagcacgccatgcagttcggcgattctggtgatgtagccggtcaggctctcgatgtaaggggtgccgatgccaacaggctgaggctggtacagtctgctccgctgagggatcagaggcttcttcaggttccagctctcgtaggtttccagcacagaggccagtcctccgcttccacctccgccagatcctccgccgccagagccgccgacttttctcttcttcttaggggcgtagtctggcacgtcgtaggggtacatggtggcgatctgagtccggtag

SEQ ID NO: 289 - protein, 493 aa, Artificial Sequence; identical to SEQ ID NO: 92
  Synthetic

SEQ ID NO: 290 - DNA, 47 bp, Artificial Sequence; identical to SEQ ID NO: 167
  Synthetic

SEQ ID NO: 291 - DNA, 47 bp, Artificial Sequence
  Synthetic
gctagcgctaccggactcagatcgccaccatgtacccctacgacgtg

SEQ ID NO: 292 - DNA, 45 bp, Artificial Sequence
  Synthetic
atctggcggaggtggaagcggaggaaaggaacagttcgagcagtg

SEQ ID NO: 293 - DNA, 20 bp, Artificial Sequence
  Synthetic
tcctccgcttccacctccgc

SEQ ID NO: 294 - DNA, 20 bp, Artificial Sequence
  Synthetic
ctagcataaccccttggggc

SEQ ID NO: 295 - DNA, 47 bp, Artificial Sequence; identical to SEQ ID NO: 167
  Synthetic

SEQ ID NO: 296 - DNA, 46 bp, Artificial Sequence
  Synthetic
agtgcgccccaaggggttatgctagtcagaattcctcgtacaccac

SEQ ID NO: 297 - DNA, 2855 bp, Artificial Sequence
  Synthetic
gctagcgctaccggactcagatcgccaccatgtacccctacgacgtgccagactacgcccctaagaagaagagaaaagtcggcggctctggcggcggaggatctggcggaggtggaagcggaggaaaggaacagttcgagcagtgggtcgcccggctgcagatttctgaagccggccagaaaatcatcgagaaagtgcggagcagcgagcccagcagaagagttggcggaggcagcaagaatgtgtccggcagatacccctccagaaagatgggcgtgaccatccagttcgagagccacagagtggaactgcccatcatctaccagctggaacacgacaaggacgtgctggaattctacgaccagcctcctcagatcaagctggactaccaggccagcaatggcagacgactgggagtgctgcacacccctgatctgttcgtgatcaggaccaatagcgccggctgggaagagtgcaagaccgagcaggatctgaagaagctggccgagaagaaccccaaccggtacttctacagcgaagagaacaaccagtggcacagcctgcctggcgaggtgtacgccaatcagtttggcctgtaccaccggatccacagcgaccgcgaaatcaactgggtgctgcagcggaacctgcagttcctggaagattactaccgcagcgagagcctggtggtggaagaggccattgctcagtctctgctggccatcgtgtctagccagcctggaattacactggccgagctgctgaacagaagcaccggcgccaagagcgacgacatctacaccctgatcatccaagagcagatctacatcgacctgaacgccacacctctggctgagcctgagagatgcctgatcttcagggatgagcagaccgccagcgcctacagactgatggttgagcagcctagcgtgtccctgcctgccatctctcccgtggtcaatattgtgacaggcgccaccgtgtcctgggatggcaagggcctgaatatcatccacgtgggcgagacagaagtgatcctgggcgccgagaacaatcagctcatcgaactgaagaaggccatcttcgagaacctcgtgcggcagggcaagatcacctctctgcagaccccagagaaaaccgccatcagcacagagagctggcagcggtttcatcaggcctctccagaggatcaggccgaggctctggaacggtacaagaccatcgagccctacctgaacggacaccctcctgagaacgagacaatccccgccagaaccatcagacactggaaggccaagtacctgatcgccatccagaagtacggctgcggctatatcggcctgctgtcccacagaagcgtgaagggcaacagacagagaaagctgcccgaggacaccctggccatcatggaaaagttcattctcgaggactacgagacactgaagcagaaacggatgtgggaagtgcacgccgctctcgtgcgagcttgtgaagaagcaggcgttatcgcccctagctacaaggccttcaccaaagaggtgcagcggagaaccggctacgagcagaccaagaagagacaaggcagaagggccgcctaccagcacgagtccttttactgggaactcgccatcaccacacctcggcacggcgatagacctttcgagatcggccacatcgaccacaccgagctggatgtggaactcgtgtgtagcgacaccggcagaaacctgggtagaccttgggccacctttctggtggacgcctactctagaaggctgctggccgtgtacctgaccttcgacagcccaagctaccggtcctgtctcatggtgctgcggatctgcgtgaagaggcatggcagactgcctcagatcgtggtggtcgataatggcgccgagtttcacagcgtgtacttcgaaaccctgctggctaccttcgagtgcaccaagaagcagcggcctccagccaaggccagatttggcagcgtgtgcgagagactgttcggcaccagcaacacccagttcgtgcacaacctgctgggcaatacccagatcacccggaacgtgcggcaagtgaccaagagcgtgaaccccaagaacctggctgtgtggacactgggactgctgtacgagtacctgtgtgcctgggcctacgaagtgtacgataccgacgaacaccccgctctgtttcagagccctagggatgcctttgccgccggaatggctatcggcggatctcgggtgcacagaatgatcccttacgacgagaacttccagatcctgacactgcccaccacctccgagggcaaagccaaggtgcaagtcggcagaggcatcaagatcaactacatctactactggtccaacagcttcagggacccacagatcgagaacaccagcgtgcagatcagatacgaccccttcaacatcggaatcgcctacgccttcgtcagaggccagtgggtgcagtgcatcagccagtactacgccgaactccagggcagaagcgagaaagagctgaaactggccagcatcgagctgcggaagcactacagcaatcacacccagcagagcaaggtgtccgccaaaaacctggccgagttcctggcaagcgtggaagctcaagaagccctgctggaacagagaagctacgacgccgaagtgaaagaggtgttccgggtcatcgaaggcggcaaggccacaaccagcagaaatgaggaacccaagctgatccaagtgaccttcgccaacaccgacttccaggccgatgaggacgaagccatcgtgcctgaaacactggtggtgtacgaggaattctgactagcataaccccttggggcgcactcctcaggtgca

SEQ ID NO: 298 - DNA, 2855 bp, Artificial Sequence
  Synthetic
tgcacctgaggagtgcgccccaaggggttatgctagtcagaattcctcgtacaccaccagtgtttcaggcacgatggcttcgtcctcatcggcctggaagtcggtgttggcgaaggtcacttggatcagcttgggttcctcatttctgctggttgtggccttgccgccttcgatgacccggaacacctctttcacttcggcgtcgtagcttctctgttccagcagggcttcttgagcttccacgcttgccaggaactcggccaggtttttggcggacaccttgctctgctgggtgtgattgctgtagtgcttccgcagctcgatgctggccagtttcagctctttctcgcttctgccctggagttcggcgtagtactggctgatgcactgcacccactggcctctgacgaaggcgtaggcgattccgatgttgaaggggtcgtatctgatctgcacgctggtgttctcgatctgtgggtccctgaagctgttggaccagtagtagatgtagttgatcttgatgcctctgccgacttgcaccttggctttgccctcggaggtggtgggcagtgtcaggatctggaagttctcgtcgtaagggatcattctgtgcacccgagatccgccgatagccattccggcggcaaaggcatccctagggctctgaaacagagcggggtgttcgtcggtatcgtacacttcgtaggcccaggcacacaggtactcgtacagcagtcccagtgtccacacagccaggttcttggggttcacgctcttggtcacttgccgcacgttccgggtgatctgggtattgcccagcaggttgtgcacgaactgggtgttgctggtgccgaacagtctctcgcacacgctgccaaatctggccttggctggaggccgctgcttcttggtgcactcgaaggtagccagcagggtttcgaagtacacgctgtgaaactcggcgccattatcgaccaccacgatctgaggcagtctgccatgcctcttcacgcagatccgcagcaccatgagacaggaccggtagcttgggctgtcgaaggtcaggtacacggccagcagccttctagagtaggcgtccaccagaaaggtggcccaaggtctacccaggtttctgccggtgtcgctacacacgagttccacatccagctcggtgtggtcgatgtggccgatctcgaaaggtctatcgccgtgccgaggtgtggtgatggcgagttcccagtaaaaggactcgtgctggtaggcggcccttctgccttgtctcttcttggtctgctcgtagccggttctccgctgcacctctttggtgaaggccttgtagctaggggcgataacgcctgcttcttcacaagctcgcacgagagcggcgtgcacttcccacatccgtttctgcttcagtgtctcgtagtcctcgagaatgaacttttccatgatggccagggtgtcctcgggcagctttctctgtctgttgcccttcacgcttctgtgggacagcaggccgatatagccgcagccgtacttctggatggcgatcaggtacttggccttccagtgtctgatggttctggcggggattgtctcgttctcaggagggtgtccgttcaggtagggctcgatggtcttgtaccgttccagagcctcggcctgatcctctggagaggcctgatgaaaccgctgccagctctctgtgctgatggcggttttctctggggtctgcagagaggtgatcttgccctgccgcacgaggttctcgaagatggccttcttcagttcgatgagctgattgttctcggcgcccaggatcacttctgtctcgcccacgtggatgatattcaggcccttgccatcccaggacacggtggcgcctgtcacaatattgaccacgggagagatggcaggcagggacacgctaggctgctcaaccatcagtctgtaggcgctggcggtctgctcatccctgaagatcaggcatctctcaggctcagccagaggtgtggcgttcaggtcgatgtagatctgctcttggatgatcagggtgtagatgtcgtcgctcttggcgccggtgcttctgttcagcagctcggccagtgtaattccaggctggctagacacgatggccagcagagactgagcaatggcctcttccaccaccaggctctcgctgcggtagtaatcttccaggaactgcaggttccgctgcagcacccagttgatttcgcggtcgctgtggatccggtggtacaggccaaactgattggcgtacacctcgccaggcaggctgtgccactggttgttctcttcgctgtagaagtaccggttggggttcttctcggccagcttcttcagatcctgctcggtcttgcactcttcccagccggcgctattggtcctgatcacgaacagatcaggggtgtgcagcactcccagtcgtctgccattgctggcctggtagtccagcttgatctgaggaggctggtcgtagaattccagcacgtccttgtcgtgttccagctggtagatgatgggcagttccactctgtggctctcgaactggatggtcacgcccatctttctggaggggtatctgccggacacattcttgctgcctccgccaactcttctgctgggctcgctgctccgcactttctcgatgattttctggccggcttcagaaatctgcagccgggcgacccactgctcgaactgttcctttcctccgcttccacctccgccagatcctccgccgccagagccgccgacttttctcttcttcttaggggcgtagtctggcacgtcgtaggggtacatggtggcgatctgagtccggtagcgctagc

SEQ ID NO: 299 - DNA, 47 bp, Artificial Sequence; identical to SEQ ID NO: 167
  Synthetic

SEQ ID NO: 300 - protein, 929 aa, Artificial Sequence; identical to SEQ ID NO: 93
  Synthetic

SEQ ID NO: 301 - protein, 619 aa, Artificial Sequence
  Synthetic
MPLHADPQHHETGPVAWAVEGQVHGQQPSRVGVHQKGGPRSTQVSAGVATHEFHIQLGVVDVADLERSIAVPRCGDGEFPVKGLVLVGGPSALSLLGLLVAGSPLHLFGEGLVARGDNACFFTSSHESGVHFPHPFLLQCLVVLENELFHDGQGVLGQLSLSVALHASVGQQADIAAAVLLDGDQVLGLPVSDGSGGDCLVLRRVSVQVGLDGLVPFQSLGLILWRGLMKPLPALCADGGFLWGLQRGDLALPHEVLEDGLLQFDELIVLGAQDHFCLAHVDDIQALAIPGHGGACHNIDHGRDGRQGHARLLNHQSVGAGGLLIPEDQASLRLSQRCGVQVDVDLLLDDQGVDVVALGAGASVQQLGQCNSRLARHDGQQRLSNGLFHHQALAAVVIFQELQVPLQHPVDFAVAVDPVVQAKLIGVHLARQAVPLVVLFAVEVPVGVLLGQLLQILLGLALFPAGAIGPDHEQIRGVQHSQSSAIAGLVVQLDLRRLVVEFQHVLVVFQLVDDGQFHSVALELDGHAHLSGGVSAGHILAASANSSAGLAAPHFLDDFLAGFRNLQPGDPLLELFLSSASTSARSSAARAADFSLLLRGVVWHVVGVHGGDLSPVALA

SEQ ID NO: 302 - DNA, 47 bp, Artificial Sequence; identical to SEQ ID NO: 167
  Synthetic

SEQ ID NO: 303 - DNA, 47 bp, Artificial Sequence; identical to SEQ ID NO: 167
  Synthetic

SEQ ID NO: 304 - DNA, 36 bp, Artificial Sequence
  Synthetic
cggactcagatcgccaccatgtacccctacgacgtg

SEQ ID NO: 305 - DNA, 47 bp, Artificial Sequence; identical to SEQ ID NO: 167
  Synthetic

SEQ ID NO: 306 - DNA, 44 bp, Artificial Sequence
  Synthetic
atctggcggaggtggaagcggaggaaccaagagcaccggctttc

SEQ ID NO: 307 - DNA, 20 bp, Artificial Sequence
  Synthetic
tcctccgcttccacctccgc

SEQ ID NO: 308 - DNA, 41 bp, Artificial Sequence
  Synthetic
cccaaggggttatgctagtcaagacacatcctgctgcactc

SEQ ID NO: 309 - DNA, 19 bp, Artificial Sequence
  Synthetic
ctagcataaccccttgggg

SEQ ID NO: 310 - DNA, 12 bp, Artificial Sequence
  Synthetic
atgagccagatc

SEQ ID NO: 311 - DNA, 1281 bp, Artificial Sequence
  Synthetic
cggactcagatcgccaccatgtacccctacgacgtgccagactacgcccctaagaagaagagaaaagtcggcggctctggcggcggaggatctggcggaggtggaagcggaggaaccaagagcaccggctttccactggaactgctgaccagacctgccaccgagagactggcctacttcgagaactacaccgtggctcaccccagactgaaagaggtgtacgagatcctgatgcggacaatcgccgaacctgccggcgctagcttcatctttgtgtatggcgctagcggcgtgggcaagaccacactgagactgagagtggaacagaagctgaccgagctggccctgcctaagctggaaagcgatagagccagagtgcccgtcgtgggcattgaggctattgcccctgagagccggtacttcaactggaaagagtactacacacgggccctgatcaccctggaagaacccctgatcgaccacaagttcgactatggcgtgcggggcatcagcagagacaacttcggcaagatcaacgtggaaagcaaggtggtggcccctgctctgagaagggccctcgaaaatgccctgatccacagacaccccgacgtgttctttgtggacgaggcccagcactttggcaaggtggcctctggctacaagctgcaggatcagctggactgcctgaagtccctggccaacatgacaggcatcctgcactgtctgctgggcacctacgagctgctgaccttcagaaatctgagcggccagctgtctcggcggagcgtggacatccacttcagaagatactgcgccgactctcccgaggacgtgcaggcctttaaaagcgtgctgctgacattccagcagcatctgcctctggccgagacacccaatctggtggatcactgggagtacttctacgagagaaccctgggctgcatcggcaccctgaaggactggctgaagagagtgctgagcgacgccctggatagagaggccacaaccatcacactgaaggacctgcagaaaagggccctgagcgtggcccagtgccagaagatgttcaaagagatccaagagggcgaacgccagctgagcgaaacagaggccgatgtgcagaacctgagatctgcccttggcctgggagccaagcctatcgttctgcctgaggaaacccctaagaccaccagacctccaggcaaagtgggcaaaagaaagcccaagagggaccccatcggagtgcagcaggatgtgtcttgactagcataaccccttggg

SEQ ID NO: 312 - DNA, 1281 bp, Artificial Sequence
  Synthetic
cccaaggggttatgctagtcaagacacatcctgctgcactccgatggggtccctcttgggctttcttttgcccactttgcctggaggtctggtggtcttaggggtttcctcaggcagaacgataggcttggctcccaggccaagggcagatctcaggttctgcacatcggcctctgtttcgctcagctggcgttcgccctcttggatctctttgaacatcttctggcactgggccacgctcagggcccttttctgcaggtccttcagtgtgatggttgtggcctctctatccagggcgtcgctcagcactctcttcagccagtccttcagggtgccgatgcagcccagggttctctcgtagaagtactcccagtgatccaccagattgggtgtctcggccagaggcagatgctgctggaatgtcagcagcacgcttttaaaggcctgcacgtcctcgggagagtcggcgcagtatcttctgaagtggatgtccacgctccgccgagacagctggccgctcagatttctgaaggtcagcagctcgtaggtgcccagcagacagtgcaggatgcctgtcatgttggccagggacttcaggcagtccagctgatcctgcagcttgtagccagaggccaccttgccaaagtgctgggcctcgtccacaaagaacacgtcggggtgtctgtggatcagggcattttcgagggcccttctcagagcaggggccaccaccttgctttccacgttgatcttgccgaagttgtctctgctgatgccccgcacgccatagtcgaacttgtggtcgatcaggggttcttccagggtgatcagggcccgtgtgtagtactctttccagttgaagtaccggctctcaggggcaatagcctcaatgcccacgacgggcactctggctctatcgctttccagcttaggcagggccagctcggtcagcttctgttccactctcagtctcagtgtggtcttgcccacgccgctagcgccatacacaaagatgaagctagcgccggcaggttcggcgattgtccgcatcaggatctcgtacacctctttcagtctggggtgagccacggtgtagttctcgaagtaggccagtctctcggtggcaggtctggtcagcagttccagtggaaagccggtgctcttggttcctccgcttccacctccgccagatcctccgccgccagagccgccgacttttctcttcttcttaggggcgtagtctggcacgtcgtaggggtacatggtggcgatctgagtccg

SEQ ID NO: 313 - protein, 414 aa, Artificial Sequence; identical to SEQ ID NO: 94
  Synthetic

SEQ ID NO: 314 - protein, 291 aa, Artificial Sequence
  Synthetic
MLLECQQHAFKGLHVLGRVGAVSSEVDVHAPPRQLAAQISEGQQLVGAQQTVQDACHVGQGLQAVQLILQLVARGHLAKVLGLVHKEHVGVSVDQGIFEGPSQSRGHHLAFHVDLAEVVSADAPHAIVELVVDQGFFQGDQGPCVVLFPVEVPALRGNSLNAHDGHSGSIAFQLRQGQLGQLLFHSQSQCGLAHAASAIHKDEASAGRFGDCPHQDLVHLFQSGVSHGVVLEVGQSLGGRSGQQFQWKAGALGSSASTSARSSAARAADFSLLLRGVVWHVVGVHGGDLSP

SEQ ID NO: 315 - DNA, 45 bp, Artificial Sequence
  Synthetic
atgagccagatcaccatccaggccagactgatcagcttcgagcaa

SEQ ID NO: 316 - DNA, 47 bp, Artificial Sequence; identical to SEQ ID NO: 167
  Synthetic

SEQ ID NO: 317 - DNA, 45 bp, Artificial Sequence
  Synthetic
ctaccggactcagatcgccaccatgaccatctacagcgagcactg

SEQ ID NO: 318 - DNA, 47 bp, Artificial Sequence; identical to SEQ ID NO: 167
  Synthetic

SEQ ID NO: 319 - DNA, 21 bp, Artificial Sequence
  Synthetic
catggtggcgatctgagtccg

SEQ ID NO: 320 - DNA, 19 bp, Artificial Sequence
  Synthetic
ggaggatctggcggaggcg

SEQ ID NO: 321 - DNA, 50 bp, Artificial Sequence
  Synthetic
cagagccgcctccgccagatcctcccagtttcagttccagggagaagttg

SEQ ID NO: 322 - DNA, 21 bp, Artificial Sequence
  Synthetic
ccccaaggggttatgctagtc

SEQ ID NO: 323 - DNA, 47 bp, Artificial Sequence; identical to SEQ ID NO: 167
  Synthetic

SEQ ID NO: 324 - DNA, 1141 bp, Artificial Sequence
  Synthetic
cgtcagatccgctagcgctaccggactcagatcgccaccatgaccatctacagcgagcactggtccctgaatcctctggaaatccctcagcggagccggctgtttagcctggaacctgtggctgtgggcacaccttatgccgagagcctgagcagctacctgcacagactggcccaggctcactgtctgacaagcgagaagctggtcatgggcgagatcgcccctctgatcctgaaggacgaggacaagagcgagctgctgagcaagaacctgagccatctgctgggcaacagcgacgccaagcctgccatcaatggcatgagagagatgaccgagaagctcgtgaccgtgctggaagaactgaccatgcggcaggacctgcggtttctgacactgctgtcttggaagggcatgatctacgacaagggcctgttccgcaactacagagcctggtgtccttgctgctgcgaggaatggatgcagaagaacaagacaatctacgagcccctgagctggtccttcaaggacgtggaattctgcctgatccacaagcagcggctgatcgaggaatgcagccattgtggcgctagactgcccgtgatggccagactttctcctgccggcttctgcagcagatgctatggctggctgggccaagagatcaagggcgaagaggaaatcgagaagtaccgcgtgaacatccagggcatctccgagctgattgccctgacacctcagctgggctacaagcccattcctatcgagctgacccggaaactgcagctgatcctgctggtgttcgagcaggccatcggcaaggatgtgaagctgctgggagatctcggcggcatcatggaaagcctgagaatcgccagcaccaccaaccagagccagccttaccacctggtcaagctgatcatccccgtgtgcgagaaggccaagatcagcgtgttccagctgttcggcagcgacttcaaagagctgggcaagatcctgtttggcaacttctccctggaactgaaactgggaggatctggcggaggcggctctggcggcggtggaagcggaggacctaagaagaagagaaaagtctacccctacgacgtgccagactacgcctgactagcataaccccttgggg

SEQ ID NO: 325 - DNA, 1141 bp, Artificial Sequence
  Synthetic
ccccaaggggttatgctagtcaggcgtagtctggcacgtcgtaggggtagacttttctcttcttcttaggtcctccgcttccaccgccgccagagccgcctccgccagatcctcccagtttcagttccagggagaagttgccaaacaggatcttgcccagctctttgaagtcgctgccgaacagctggaacacgctgatcttggccttctcgcacacggggatgatcagcttgaccaggtggtaaggctggctctggttggtggtgctggcgattctcaggctttccatgatgccgccgagatctcccagcagcttcacatccttgccgatggcctgctcgaacaccagcaggatcagctgcagtttccgggtcagctcgataggaatgggcttgtagcccagctgaggtgtcagggcaatcagctcggagatgccctggatgttcacgcggtacttctcgatttcctcttcgcccttgatctcttggcccagccagccatagcatctgctgcagaagccggcaggagaaagtctggccatcacgggcagtctagcgccacaatggctgcattcctcgatcagccgctgcttgtggatcaggcagaattccacgtccttgaaggaccagctcaggggctcgtagattgtcttgttcttctgcatccattcctcgcagcagcaaggacaccaggctctgtagttgcggaacaggcccttgtcgtagatcatgcccttccaagacagcagtgtcagaaaccgcaggtcctgccgcatggtcagttcttccagcacggtcacgagcttctcggtcatctctctcatgccattgatggcaggcttggcgtcgctgttgcccagcagatggctcaggttcttgctcagcagctcgctcttgtcctcgtccttcaggatcagaggggcgatctcgcccatgaccagcttctcgcttgtcagacagtgagcctgggccagtctgtgcaggtagctgctcaggctctcggcataaggtgtgcccacagccacaggttccaggctaaacagccggctccgctgagggatttccagaggattcagggaccagtgctcgctgtagatggtcatggtggcgatctgagtccggtagcgctagcggatctgacg

SEQ ID NO: 326 - protein, 360 aa, Artificial Sequence; identical to SEQ ID NO: 95
  Synthetic

SEQ ID NO: 327 - protein, 190 aa, Artificial Sequence
  Synthetic
MAAFLDQPLLVDQAEFHVLEGPAQGLVDCLVLLHPFLAAARTPGSVVAEQALVVDHALPRQQCQKPQVLPHGQFFQHGHELLGHLSHAIDGRLGVAVAQQMAQVLAQQLALVLVLQDQRGDLAHDQLLACQTVSLGQSVQVAAQALGIRCAHSHRFQAKQPAPLRDFQRIQGPVLAVDGHGGDLSPVALA

SEQ ID NO: 328 - DNA, 47 bp, Artificial Sequence; identical to SEQ ID NO: 167
  Synthetic

SEQ ID NO: 329 - DNA, 47 bp, Artificial Sequence; identical to SEQ ID NO: 167
  Synthetic

SEQ ID NO: 330 - DNA, 42 bp, Artificial Sequence
  Synthetic
ccggactcagatcgccaccatgctggcctctgtgctggaaac

SEQ ID NO: 331 - DNA, 21 bp, Artificial Sequence
  Synthetic
catggtggcgatctgagtccg

SEQ ID NO: 332 - DNA, 19 bp, Artificial Sequence
  Synthetic
ggaggatctggcggaggcg

SEQ ID NO: 333 - DNA, 46 bp, Artificial Sequence
  Synthetic
cagagccgcctccgccagatcctcccaggccaaattctctccgagc

SEQ ID NO: 334 - DNA, 23 bp, Artificial Sequence
  Synthetic
cgccccaaggggttatgctagtc

SEQ ID NO: 335 - DNA, 47 bp, Artificial Sequence; identical to SEQ ID NO: 167
  Synthetic

SEQ ID NO: 336 - DNA, 1522 bp, Artificial Sequence
  Synthetic
ccggactcagatcgccaccatgctggcctctgtgctggaaacctacgagagctggaacctgaagaagcctctgatccctcagcggagcagactgtaccagcctcagcctgttggcatcggcaccccttacatcgagagcctgaccggctacatcaccagaatcgccgaactgcatggcgtgctgcctggggtgctgatgaccagagaaatcgcccctctggtcaacaagatctacttccagaacggcgccaaccggggcttcagagagatcttcaacagatctcaggccctgaacggcatgggagagatggccgctgatctggtgcaggtcctgcagaagctgaccctgagggacgacctgagattcctgaccatgctgttctggtccaacatcctgacacctcggaacctgttccggaccagaaaggcctggtgtcccatctgctaccaagagcggcaccagaacggactggtggtgtacgaacagctgctgtggaccatcaacctgatcaccatctgtccccagcaccagaaacctctggtggaactgtgccctcactgcaaccacgagagccctctgctgaattggagaagcagacccggctactgcagcaagtgtggcgaatggctgggcgccaatcagtgcctgaaaaccttcacagatggcgagggcagcatcaaactgcagctggaatggcagtactggaccgccaatgttgtgggcgagctgatcctggccagccagtgttttgagagcgcccctagcaaagagaacatcaccaagagcctgaacatcgtgatcgacaaggtggccgagaacaacgccgctgccttctctagactgatcggcgtgcccaagaacagcctgtggatgtggcagagcaccaagacactgcccgagctgaacaccctgctgaagatctgctacgagctggaaatcagcctggtcgagtttctgacccctaagaacctgattaccaagtccttcaccaagatcagccagaagcacctccagctgagcagaacccctagagtgtcccctaagagcttcgaccagtaccaagtgaaggacgccctgctggccatcctggccggaaatgaagaacctcctccaaccatggaagaagtgggcaagagactgggccaccacaaccggacaatcagcagacacttccccgatctgtgcagcgccatcagcgccaagtgccggaattacaacaaggcctgccggctgaagtccatcgagaagctgtgtagcgaagtgcgcgagatcgtgctgagcctgaatgctcagggcgtgtaccctacagagggcagagtgtgcgaactgatgcccaatcctggctgcttccggtacaagcaagtgcgggctgccttcaacgacgctcggagagaatttggcctgggaggatctggcggaggcggctctggcggcggtggaagcggaggacctaagaagaagagaaaagtctacccctacgacgtgccagactacgcctgactagcataaccccttggggcg

SEQ ID NO: 337 - DNA, 1522 bp, Artificial Sequence
  Synthetic
cgccccaaggggttatgctagtcaggcgtagtctggcacgtcgtaggggtagacttttctcttcttcttaggtcctccgcttccaccgccgccagagccgcctccgccagatcctcccaggccaaattctctccgagcgtcgttgaaggcagcccgcacttgcttgtaccggaagcagccaggattgggcatcagttcgcacactctgccctctgtagggtacacgccctgagcattcaggctcagcacgatctcgcgcacttcgctacacagcttctcgatggacttcagccggcaggccttgttgtaattccggcacttggcgctgatggcgctgcacagatcggggaagtgtctgctgattgtccggttgtggtggcccagtctcttgcccacttcttccatggttggaggaggttcttcatttccggccaggatggccagcagggcgtccttcacttggtactggtcgaagctcttaggggacactctaggggttctgctcagctggaggtgcttctggctgatcttggtgaaggacttggtaatcaggttcttaggggtcagaaactcgaccaggctgatttccagctcgtagcagatcttcagcagggtgttcagctcgggcagtgtcttggtgctctgccacatccacaggctgttcttgggcacgccgatcagtctagagaaggcagcggcgttgttctcggccaccttgtcgatcacgatgttcaggctcttggtgatgttctctttgctaggggcgctctcaaaacactggctggccaggatcagctcgcccacaacattggcggtccagtactgccattccagctgcagtttgatgctgccctcgccatctgtgaaggttttcaggcactgattggcgcccagccattcgccacacttgctgcagtagccgggtctgcttctccaattcagcagagggctctcgtggttgcagtgagggcacagttccaccagaggtttctggtgctggggacagatggtgatcaggttgatggtccacagcagctgttcgtacaccaccagtccgttctggtgccgctcttggtagcagatgggacaccaggcctttctggtccggaacaggttccgaggtgtcaggatgttggaccagaacagcatggtcaggaatctcaggtcgtccctcagggtcagcttctgcaggacctgcaccagatcagcggccatctctcccatgccgttcagggcctgagatctgttgaagatctctctgaagccccggttggcgccgttctggaagtagatcttgttgaccagaggggcgatttctctggtcatcagcaccccaggcagcacgccatgcagttcggcgattctggtgatgtagccggtcaggctctcgatgtaaggggtgccgatgccaacaggctgaggctggtacagtctgctccgctgagggatcagaggcttcttcaggttccagctctcgtaggtttccagcacagaggccagcatggtggcgatctgagtccgg

SEQ ID NO: 338 - protein, 493 aa, Artificial Sequence; identical to SEQ ID NO: 96
  Synthetic

SEQ ID NO: 339 - DNA, 47 bp, Artificial Sequence; identical to SEQ ID NO: 167
  Synthetic

SEQ ID NO: 340 - DNA, 47 bp, Artificial Sequence; identical to SEQ ID NO: 167
  Synthetic

SEQ ID NO: 341 - DNA, 45 bp, Artificial Sequence
  Synthetic
ctaccggactcagatcgccaccatgaaggaacagttcgagcagtg

SEQ ID NO: 342 - DNA, 21 bp, Artificial Sequence
  Synthetic
catggtggcgatctgagtccg

SEQ ID NO: 343 - DNA, 19 bp, Artificial Sequence
  Synthetic
ggaggatctggcggaggcg

SEQ ID NO: 344 - DNA, 44 bp, Artificial Sequence
  Synthetic
cagagccgcctccgccagatcctccgaattcctcgtacaccacc

SEQ ID NO: 345 - DNA, 24 bp, Artificial Sequence
  Synthetic
gcgccccaaggggttatgctagtc

SEQ ID NO: 346 - DNA, 2856 bp, Artificial Sequence
  Synthetic
tgaaccgtcagatccgctagcgctaccggactcagatcgccaccatgaaggaacagttcgagcagtgggtcgcccggctgcagatttctgaagccggccagaaaatcatcgagaaagtgcggagcagcgagcccagcagaagagttggcggaggcagcaagaatgtgtccggcagatacccctccagaaagatgggcgtgaccatccagttcgagagccacagagtggaactgcccatcatctaccagctggaacacgacaaggacgtgctggaattctacgaccagcctcctcagatcaagctggactaccaggccagcaatggcagacgactgggagtgctgcacacccctgatctgttcgtgatcaggaccaatagcgccggctgggaagagtgcaagaccgagcaggatctgaagaagctggccgagaagaaccccaaccggtacttctacagcgaagagaacaaccagtggcacagcctgcctggcgaggtgtacgccaatcagtttggcctgtaccaccggatccacagcgaccgcgaaatcaactgggtgctgcagcggaacctgcagttcctggaagattactaccgcagcgagagcctggtggtggaagaggccattgctcagtctctgctggccatcgtgtctagccagcctggaattacactggccgagctgctgaacagaagcaccggcgccaagagcgacgacatctacaccctgatcatccaagagcagatctacatcgacctgaacgccacacctctggctgagcctgagagatgcctgatcttcagggatgagcagaccgccagcgcctacagactgatggttgagcagcctagcgtgtccctgcctgccatctctcccgtggtcaatattgtgacaggcgccaccgtgtcctgggatggcaagggcctgaatatcatccacgtgggcgagacagaagtgatcctgggcgccgagaacaatcagctcatcgaactgaagaaggccatcttcgagaacctcgtgcggcagggcaagatcacctctctgcagaccccagagaaaaccgccatcagcacagagagctggcagcggtttcatcaggcctctccagaggatcaggccgaggctctggaacggtacaagaccatcgagccctacctgaacggacaccctcctgagaacgagacaatccccgccagaaccatcagacactggaaggccaagtacctgatcgccatccagaagtacggctgcggctatatcggcctgctgtcccacagaagcgtgaagggcaacagacagagaaagctgcccgaggacaccctggccatcatggaaaagttcattctcgaggactacgagacactgaagcagaaacggatgtgggaagtgcacgccgctctcgtgcgagcttgtgaagaagcaggcgttatcgcccctagctacaaggccttcaccaaagaggtgcagcggagaaccggctacgagcagaccaagaagagacaaggcagaagggccgcctaccagcacgagtccttttactgggaactcgccatcaccacacctcggcacggcgatagacctttcgagatcggccacatcgaccacaccgagctggatgtggaactcgtgtgtagcgacaccggcagaaacctgggtagaccttgggccacctttctggtggacgcctactctagaaggctgctggccgtgtacctgaccttcgacagcccaagctaccggtcctgtctcatggtgctgcggatctgcgtgaagaggcatggcagactgcctcagatcgtggtggtcgataatggcgccgagtttcacagcgtgtacttcgaaaccctgctggctaccttcgagtgcaccaagaagcagcggcctccagccaaggccagatttggcagcgtgtgcgagagactgttcggcaccagcaacacccagttcgtgcacaacctgctgggcaatacccagatcacccggaacgtgcggcaagtgaccaagagcgtgaaccccaagaacctggctgtgtggacactgggactgctgtacgagtacctgtgtgcctgggcctacgaagtgtacgataccgacgaacaccccgctctgtttcagagccctagggatgcctttgccgccggaatggctatcggcggatctcgggtgcacagaatgatcccttacgacgagaacttccagatcctgacactgcccaccacctccgagggcaaagccaaggtgcaagtcggcagaggcatcaagatcaactacatctactactggtccaacagcttcagggacccacagatcgagaacaccagcgtgcagatcagatacgaccccttcaacatcggaatcgcctacgccttcgtcagaggccagtgggtgcagtgcatcagccagtactacgccgaactccagggcagaagcgagaaagagctgaaactggccagcatcgagctgcggaagcactacagcaatcacacccagcagagcaaggtgtccgccaaaaacctggccgagttcctggcaagcgtggaagctcaagaagccctgctggaacagagaagctacgacgccgaagtgaaagaggtgttccgggtcatcgaaggcggcaaggccacaaccagcagaaatgaggaacccaagctgatccaagtgaccttcgccaacaccgacttccaggccgatgaggacgaagccatcgtgcctgaaacactggtggtgtacgaggaattcggaggatctggcggaggcggctctggcggcggtggaagcggaggacctaagaagaagagaaaagtctacccctacgacgtgccagactacgcctgactagcataaccccttggggcgc

SEQ ID NO: 347 - DNA, 2856 bp, Artificial Sequence
  Synthetic
gcgccccaaggggttatgctagtcaggcgtagtctggcacgtcgtaggggtagacttttctcttcttcttaggtcctccgcttccaccgccgccagagccgcctccgccagatcctccgaattcctcgtacaccaccagtgtttcaggcacgatggcttcgtcctcatcggcctggaagtcggtgttggcgaaggtcacttggatcagcttgggttcctcatttctgctggttgtggccttgccgccttcgatgacccggaacacctctttcacttcggcgtcgtagcttctctgttccagcagggcttcttgagcttccacgcttgccaggaactcggccaggtttttggcggacaccttgctctgctgggtgtgattgctgtagtgcttccgcagctcgatgctggccagtttcagctctttctcgcttctgccctggagttcggcgtagtactggctgatgcactgcacccactggcctctgacgaaggcgtaggcgattccgatgttgaaggggtcgtatctgatctgcacgctggtgttctcgatctgtgggtccctgaagctgttggaccagtagtagatgtagttgatcttgatgcctctgccgacttgcaccttggctttgccctcggaggtggtgggcagtgtcaggatctggaagttctcgtcgtaagggatcattctgtgcacccgagatccgccgatagccattccggcggcaaaggcatccctagggctctgaaacagagcggggtgttcgtcggtatcgtacacttcgtaggcccaggcacacaggtactcgtacagcagtcccagtgtccacacagccaggttcttggggttcacgctcttggtcacttgccgcacgttccgggtgatctgggtattgcccagcaggttgtgcacgaactgggtgttgctggtgccgaacagtctctcgcacacgctgccaaatctggccttggctggaggccgctgcttcttggtgcactcgaaggtagccagcagggtttcgaagtacacgctgtgaaactcggcgccattatcgaccaccacgatctgaggcagtctgccatgcctcttcacgcagatccgcagcaccatgagacaggaccggtagcttgggctgtcgaaggtcaggtacacggccagcagccttctagagtaggcgtccaccagaaaggtggcccaaggtctacccaggtttctgccggtgtcgctacacacgagttccacatccagctcggtgtggtcgatgtggccgatctcgaaaggtctatcgccgtgccgaggtgtggtgatggcgagttcccagtaaaaggactcgtgctggtaggcggcccttctgccttgtctcttcttggtctgctcgtagccggttctccgctgcacctctttggtgaaggccttgtagctaggggcgataacgcctgcttcttcacaagctcgcacgagagcggcgtgcacttcccacatccgtttctgcttcagtgtctcgtagtcctcgagaatgaacttttccatgatggccagggtgtcctcgggcagctttctctgtctgttgcccttcacgcttctgtgggacagcaggccgatatagccgcagccgtacttctggatggcgatcaggtacttggccttccagtgtctgatggttctggcggggattgtctcgttctcaggagggtgtccgttcaggtagggctcgatggtcttgtaccgttccagagcctcggcctgatcctctggagaggcctgatgaaaccgctgccagctctctgtgctgatggcggttttctctggggtctgcagagaggtgatcttgccctgccgcacgaggttctcgaagatggccttcttcagttcgatgagctgattgttctcggcgcccaggatcacttctgtctcgcccacgtggatgatattcaggcccttgccatcccaggacacggtggcgcctgtcacaatattgaccacgggagagatggcaggcagggacacgctaggctgctcaaccatcagtctgtaggcgctggcggtctgctcatccctgaagatcaggcatctctcaggctcagccagaggtgtggcgttcaggtcgatgtagatctgctcttggatgatcagggtgtagatgtcgtcgctcttggcgccggtgcttctgttcagcagctcggccagtgtaattccaggctggctagacacgatggccagcagagactgagcaatggcctcttccaccaccaggctctcgctgcggtagtaatcttccaggaactgcaggttccgctgcagcacccagttgatttcgcggtcgctgtggatccggtggtacaggccaaactgattggcgtacacctcgccaggcaggctgtgccactggttgttctcttcgctgtagaagtaccggttggggttcttctcggccagcttcttcagatcctgctcggtcttgcactcttcccagccggcgctattggtcctgatcacgaacagatcaggggtgtgcagcactcccagtcgtctgccattgctggcctggtagtccagcttgatctgaggaggctggtcgtagaattccagcacgtccttgtcgtgttccagctggtagatgatgggcagttccactctgtggctctcgaactggatggtcacgcccatctttctggaggggtatctgccggacacattcttgctgcctccgccaactcttctgctgggctcgctgctccgcactttctcgatgattttctggccggcttcagaaatctgcagccgggcgacccactgctcgaactgttccttcatggtggcgatctgagtccggtagcgctagcggatctgacggttca

SEQ ID NO: 348 - protein, 929 aa, Artificial Sequence; identical to SEQ ID NO: 97
  Synthetic

SEQ ID NO: 349 - protein, 593 aa, Artificial Sequence
  Synthetic
MPLHADPQHHETGPVAWAVEGQVHGQQPSRVGVHQKGGPRSTQVSAGVATHEFHIQLGVVDVADLERSIAVPRCGDGEFPVKGLVLVGGPSALSLLGLLVAGSPLHLFGEGLVARGDNACFFTSSHESGVHFPHPFLLQCLVVLENELFHDGQGVLGQLSLSVALHASVGQQADIAAAVLLDGDQVLGLPVSDGSGGDCLVLRRVSVQVGLDGLVPFQSLGLILWRGLMKPLPALCADGGFLWGLQRGDLALPHEVLEDGLLQFDELIVLGAQDHFCLAHVDDIQALAIPGHGGACHNIDHGRDGRQGHARLLNHQSVGAGGLLIPEDQASLRLSQRCGVQVDVDLLLDDQGVDVVALGAGASVQQLGQCNSRLARHDGQQRLSNGLFHHQALAAVVIFQELQVPLQHPVDFAVAVDPVVQAKLIGVHLARQAVPLVVLFAVEVPVGVLLGQLLQILLGLALFPAGAIGPDHEQIRGVQHSQSSAIAGLVVQLDLRRLVVEFQHVLVVFQLVDDGQFHSVALELDGHAHLSGGVSAGHILAASANSSAGLAAPHFLDDFLAGFRNLQPGDPLLELFLHGGDLSPVALADLTVH

SEQ ID NO: 350 - DNA, 47 bp, Artificial Sequence; identical to SEQ ID NO: 167
  Synthetic

SEQ ID NO: 351 - DNA, 47 bp, Artificial Sequence; identical to SEQ ID NO: 167
  Synthetic

SEQ ID NO: 352 - DNA, 47 bp, Artificial Sequence; identical to SEQ ID NO: 167
  Synthetic

SEQ ID NO: 353 - DNA, 44 bp, Artificial Sequence
  Synthetic
ctaccggactcagatcgccaccatgaccaagagcaccggctttc

SEQ ID NO: 354 - DNA, 21 bp, Artificial Sequence
  Synthetic
catggtggcgatctgagtccg

SEQ ID NO: 355 - DNA, 19 bp, Artificial Sequence
  Synthetic
ggaggatctggcggaggcg

SEQ ID NO: 356 - DNA, 46 bp, Artificial Sequence
  Synthetic
cagagccgcctccgccagatcctccagacacatcctgctgcactcc

SEQ ID NO: 357 - DNA, 47 bp, Artificial Sequence; identical to SEQ ID NO: 167
  Synthetic

SEQ ID NO: 358 - DNA, 32 bp, Artificial Sequence
  Synthetic
tgaggagtgcgccccaaggggttatgctagtc

SEQ ID NO: 359 - DNA, 1299 bp, Artificial Sequence
  Synthetic
cgctaccggactcagatcgccaccatgaccaagagcaccggctttccactggaactgctgaccagacctgccaccgagagactggcctacttcgagaactacaccgtggctcaccccagactgaaagaggtgtacgagatcctgatgcggacaatcgccgaacctgccggcgctagcttcatctttgtgtatggcgctagcggcgtgggcaagaccacactgagactgagagtggaacagaagctgaccgagctggccctgcctaagctggaaagcgatagagccagagtgcccgtcgtgggcattgaggctattgcccctgagagccggtacttcaactggaaagagtactacacacgggccctgatcaccctggaagaacccctgatcgaccacaagttcgactatggcgtgcggggcatcagcagagacaacttcggcaagatcaacgtggaaagcaaggtggtggcccctgctctgagaagggccctcgaaaatgccctgatccacagacaccccgacgtgttctttgtggacgaggcccagcactttggcaaggtggcctctggctacaagctgcaggatcagctggactgcctgaagtccctggccaacatgacaggcatcctgcactgtctgctgggcacctacgagctgctgaccttcagaaatctgagcggccagctgtctcggcggagcgtggacatccacttcagaagatactgcgccgactctcccgaggacgtgcaggcctttaaaagcgtgctgctgacattccagcagcatctgcctctggccgagacacccaatctggtggatcactgggagtacttctacgagagaaccctgggctgcatcggcaccctgaaggactggctgaagagagtgctgagcgacgccctggatagagaggccacaaccatcacactgaaggacctgcagaaaagggccctgagcgtggcccagtgccagaagatgttcaaagagatccaagagggcgaacgccagctgagcgaaacagaggccgatgtgcagaacctgagatctgcccttggcctgggagccaagcctatcgttctgcctgaggaaacccctaagaccaccagacctccaggcaaagtgggcaaaagaaagcccaagagggaccccatcggagtgcagcaggatgtgtctggaggatctggcggaggcggctctggcggcggtggaagcggaggacctaagaagaagagaaaagtctacccctacgacgtgccagactacgcctgactagcataaccccttggggcgcactcctca

SEQ ID NO: 360 - DNA, 1299 bp, Artificial Sequence
  Synthetic
tgaggagtgcgccccaaggggttatgctagtcaggcgtagtctggcacgtcgtaggggtagacttttctcttcttcttaggtcctccgcttccaccgccgccagagccgcctccgccagatcctccagacacatcctgctgcactccgatggggtccctcttgggctttcttttgcccactttgcctggaggtctggtggtcttaggggtttcctcaggcagaacgataggcttggctcccaggccaagggcagatctcaggttctgcacatcggcctctgtttcgctcagctggcgttcgccctcttggatctctttgaacatcttctggcactgggccacgctcagggcccttttctgcaggtccttcagtgtgatggttgtggcctctctatccagggcgtcgctcagcactctcttcagccagtccttcagggtgccgatgcagcccagggttctctcgtagaagtactcccagtgatccaccagattgggtgtctcggccagaggcagatgctgctggaatgtcagcagcacgcttttaaaggcctgcacgtcctcgggagagtcggcgcagtatcttctgaagtggatgtccacgctccgccgagacagctggccgctcagatttctgaaggtcagcagctcgtaggtgcccagcagacagtgcaggatgcctgtcatgttggccagggacttcaggcagtccagctgatcctgcagcttgtagccagaggccaccttgccaaagtgctgggcctcgtccacaaagaacacgtcggggtgtctgtggatcagggcattttcgagggcccttctcagagcaggggccaccaccttgctttccacgttgatcttgccgaagttgtctctgctgatgccccgcacgccatagtcgaacttgtggtcgatcaggggttcttccagggtgatcagggcccgtgtgtagtactctttccagttgaagtaccggctctcaggggcaatagcctcaatgcccacgacgggcactctggctctatcgctttccagcttaggcagggccagctcggtcagcttctgttccactctcagtctcagtgtggtcttgcccacgccgctagcgccatacacaaagatgaagctagcgccggcaggttcggcgattgtccgcatcaggatctcgtacacctctttcagtctggggtgagccacggtgtagttctcgaagtaggccagtctctcggtggcaggtctggtcagcagttccagtggaaagccggtgctcttggtcatggtggcgatctgagtccggtagcg

SEQ ID NO: 361 - protein, 264 aa, Artificial Sequence
  Synthetic
MLLECQQHAFKGLHVLGRVGAVSSEVDVHAPPRQLAAQISEGQQLVGAQQTVQDACHVGQGLQAVQLILQLVARGHLAKVLGLVHKEHVGVSVDQGIFEGPSQSRGHHLAFHVDLAEVVSADAPHAIVELVVDQGFFQGDQGPCVVLFPVEVPALRGNSLNAHDGHSGSIAFQLRQGQLGQLLFHSQSQCGLAHAASAIHKDEASAGRFGDCPHQDLVHLFQSGVSHGVVLEVGQSLGGRSGQQFQWKAGALGHGGDLSPVALA

SEQ ID NO: 362 - protein, 414 aa, Artificial Sequence; identical to SEQ ID NO: 98
  Synthetic

SEQ ID NO: 363 - DNA, 4445 bp, Artificial Sequence
  Synthetic
cgttacataacttacggtaaatggcccgcctggctgaccgcccaacgacccccgcccattgacgtcaataatgacgtatgttcccatagtaacgccaatagggactttccattgacgtcaatgggtggagtatttacggtaaactgcccacttggcagtacatcaagtgtatcatatgccaagtacgccccctattgacgtcaatgacggtaaatggcccgcctggcattatgcccagtacatgaccttatgggactttcctacttggcagtacatctacgtattagtcatcgctattaccatggtgatgcggttttggcagtacatcaatgggcgtggatagcggtttgactcacggggatttccaagtctccaccccattgacgtcaatgggagtttgttttggcaccaaaatcaacgggactttccaaaatgtcgtaacaactccgccccattgacgcaaatgggcggtaggcgtgtacggtgggaggtctatataagcagagctggtttagtgaaccgtcagatccgctagcgctaccggactcagatcgccaccatgtacccctacgacgtgccagactacgcccctaagaagaagagaaaagtcggcggctctggcggcggaggatctggcggaggtggaagcggaggaatcgcccctctgatcctgtacctggacgtgcccttcaccaccttcagagagtctcacgccagagagatgggcaagacataccccgttcctccaccagccacagtgtacggcatgctgctgtctctcgtgggcgagacaaacgtgtacagacactgcggcgtggaactggccattgccatgctgagcagccccaagaagtcccggatcctgcggcagatgcggagattcaagaacgccgacttctctcaccccgagaacgtgatcccttgctaccaagagatcctgagcaacctgaagtgcctgatctgggtccgaagcgacgaggaaaagatccagcctagcctgagagagcggatccagctggcctttgatcaccctgaactcgtcagaagattcggctgcctgttcctgggcgagagcgaccagctgatcaagaccatcaagctggccagagaggactacctggaaggcgttagacagtgggccatccgggacaacagaggcagactgacactgccctattgggtcgaccacgtgggcagcagaaatacccggttcctgagataccggatcgaggaaatggaccggctgagccctcctgacctggcttggacaatggtgcagagccccatctgactagcataaccccttggggcgcactcctcaggtgcaggctgcctatcagaaggtggtggctggtgtggccaatgccctggctcacaaataccactgagatctttttccctctgccaaaaattatggggacatcatgaagccccttgagcatctgacttctggctaataaaggaaatttattttcattgcaatagtgtgttggaattttttgtgtctctcactcggaaggacatatgggagggcaaatcatttaaaacatcagaatgagtatttggtttagagtttggcaacatatgcccatatgctggctgccatgaacaaaggttggctataaagaggtcatcagtatatgaaacagccccctgctgtccattccttattccatagaaaagccttgacttgaggttagattttttttatattttgttttgtgttatttttttctttaacatccctaaaattttccttacatgttttactagccagatttttcctcctctcctgactactcccagtcatagctgtccctcttctcttatggagatccctcgacctgcagcccaagcttggcgtaatcatggtcatagctgtttcctgtgtgaaattgttatccgctcacaattccacacaacatacgagccggaagcataaagtgtaaagcctggggtgcctaatgagtgagctaactcacattaattgcgttgcgctcactgcccgctttccagtcgggaaacctgtcgtgccagcggatccgcatctcaattagtcagcaaccatagtcccgcccctaactccgcccatcccgcccctaactccgcccagttccgcccattctccgccccatggctgactaattttttttatttatgcagaggccgaggccgcctcggcctctgagctattccagaagtagtgaggaggcttttttggaggcctaggcttttgcaaaaagctaacttgtttattgcagcttataatggttacaaataaagcaatagcatcacaaatttcacaaataaagcatttttttcactgcattctagttgtggtttgtccaaactcatcaatgtatcttatcatgtctggatccgctgcattaatgaatcggccaacgcgcggggagaggcggtttgcgtattgggcgctcttccgcttcctcgctcactgactcgctgcgctcggtcgttcggctgcggcgagcggtatcagctcactcaaaggcggtaatacggttatccacagaatcaggggataacgcaggaaagaacatgtgagcaaaaggccagcaaaaggccaggaaccgtaaaaaggccgcgttgctggcgtttttccataggctccgcccccctgacgagcatcacaaaaatcgacgctcaagtcagaggtggcgaaacccgacaggactataaagataccaggcgtttccccctggaagctccctcgtgcgctctcctgttccgaccctgccgcttaccggatacctgtccgcctttctcccttcgggaagcgtggcgctttctcatagctcacgctgtaggtatctcagttcggtgtaggtcgttcgctccaagctgggctgtgtgcacgaaccccccgttcagcccgaccgctgcgccttatccggtaactatcgtcttgagtccaacccggtaagacacgacttatcgccactggcagcagccactggtaacaggattagcagagcgaggtatgtaggcggtgctacagagttcttgaagtggtggcctaactacggctacactagaagaacagtatttggtatctgcgctctgctgaagccagttaccttcggaaaaagagttggtagctcttgatccggcaaacaaaccaccgctggtagcggtggtttttttgtttgcaagcagcagattacgcgcagaaaaaaaggatctcaagaagatcctttgatcttttctacggggtctgacgctcagtggaacgaaaactcacgttaagggattttggtcatgagattatcaaaaaggatcttcacctagatccttttaaattaaaaatgaagttttaaatcaatctaaagtatatatgagtaaacttggtctgacagttaccaatgcttaatcagtgaggcacctatctcagcgatctgtctatttcgttcatccatagttgcctgactccccgtcgtgtagataactacgatacgggagggcttaccatctggccccagtgctgcaatgataccgcgagacccacgctcaccggctccagatttatcagcaataaaccagccagccggaagggccgagcgcagaagtggtcctgcaactttatccgcctccatccagtctattaattgttgccgggaagctagagtaagtagttcgccagttaatagtttgcgcaacgttgttgccattgctacaggcatcgtggtgtcacgctcgtcgtttggtatggcttcattcagctccggttcccaacgatcaaggcgagttacatgatcccccatgttgtgcaaaaaagcggttagctccttcggtcctccgatcgttgtcagaagtaagttggccgcagtgttatcactcatggttatggcagcactgcataattctcttactgtcatgccatccgtaagatgcttttctgtgactggtgagtactcaaccaagtcattctgagaatagtgtatgcggcgaccgagttgctcttgcccggcgtcaatacgggataataccgcgccacatagcagaactttaaaagtgctcatcattggaaaacgttcttcggggcgaaaactctcaaggatcttaccgctgttgagatccagttcgatgtaacccactcgtgcacccaactgatcttcagcatcttttactttcaccagcgtttctgggtgagcaaaaacaggaaggcaaaatgccgcaaaaaagggaataagggcgacacggaaatgttgaatactcatactcttcctttttcaatattattgaagcatttatcagggttattgtctcatgagcggatacatatttgaatgtatttagaaaaataaacaaataggggttccgcgcacatttccccgaaaagtgccacctgggtcgacattgattattgactagtaatagtaatcaattacggggtcattagttcatagcccatatatggagttccg

SEQ ID NO: 364 - DNA, 4469 bp, Artificial Sequence
  Synthetic
cgttacataacttacggtaaatggcccgcctggctgaccgcccaacgacccccgcccattgacgtcaataatgacgtatgttcccatagtaacgccaatagggactttccattgacgtcaatgggtggagtatttacggtaaactgcccacttggcagtacatcaagtgtatcatatgccaagtacgccccctattgacgtcaatgacggtaaatggcccgcctggcattatgcccagtacatgaccttatgggactttcctacttggcagtacatctacgtattagtcatcgctattaccatggtgatgcggttttggcagtacatcaatgggcgtggatagcggtttgactcacggggatttccaagtctccaccccattgacgtcaatgggagtttgttttggcaccaaaatcaacgggactttccaaaatgtcgtaacaactccgccccattgacgcaaatgggcggtaggcgtgtacggtgggaggtctatataagcagagctggtttagtgaaccgtcagatccgctagcgctaccggactcagatcgccaccatgtacccctacgacgtgccagactacgcccctaagaagaagagaaaagtcggcggctctggcggcggaggatctggcggaggtggaagcggaggaaccgccatcctgatccagagcgaggaatacgtggacctgaccttcaagctgagaggcgcccctattcctctggacaacggctacctgacatacgccgctctgagcagaatctgccctcctctgcacgaactgaagtccatcggcattcaccctatcgccggcattcccaccagaaacaacctgctggaactgacagcccagagccggctgaagatcagaatctaccaccagcagatccctctgatctacccctacctggccggacaggcctttcacatcggccagaacttctaccagctggacatccccgactacaagcccctgatcagcagcgagagcgtgtacagcagactggtcatcatcaagggcttccaggacagcaccaacttcatcgaggccgtgcagcggcagatggacaatctgggaatccagggcaagatcgagctgctgaccagacaggatggcacccctcagagaaggcagctgaccatcaacaaagagggcaagcagttcaaagtgcgcggcttcggcgtgaagatctccgagctgaaccctgaggacagcctgacactgcaagagcaaggcatcggcggcaagcggaagatgatgtgcggcatctttgtgcccgccaccagatccaaagaggaagaggaaacctgactagcataaccccttggggcgcactcctcaggtgcaggctgcctatcagaaggtggtggctggtgtggccaatgccctggctcacaaataccactgagatctttttccctctgccaaaaattatggggacatcatgaagccccttgagcatctgacttctggctaataaaggaaatttattttcattgcaatagtgtgttggaattttttgtgtctctcactcggaaggacatatgggagggcaaatcatttaaaacatcagaatgagtatttggtttagagtttggcaacatatgcccatatgctggctgccatgaacaaaggttggctataaagaggtcatcagtatatgaaacagccccctgctgtccattccttattccatagaaaagccttgacttgaggttagattttttttatattttgttttgtgttatttttttctttaacatccctaaaattttccttacatgttttactagccagatttttcctcctctcctgactactcccagtcatagctgtccctcttctcttatggagatccctcgacctgcagcccaagcttggcgtaatcatggtcatagctgtttcctgtgtgaaattgttatccgctcacaattccacacaacatacgagccggaagcataaagtgtaaagcctggggtgcctaatgagtgagctaactcacattaattgcgttgcgctcactgcccgctttccagtcgggaaacctgtcgtgccagcggatccgcatctcaattagtcagcaaccatagtcccgcccctaactccgcccatcccgcccctaactccgcccagttccgcccattctccgccccatggctgactaattttttttatttatgcagaggccgaggccgcctcggcctctgagctattccagaagtagtgaggaggcttttttggaggcctaggcttttgcaaaaagctaacttgtttattgcagcttataatggttacaaataaagcaatagcatcacaaatttcacaaataaagcatttttttcactgcattctagttgtggtttgtccaaactcatcaatgtatcttatcatgtctggatccgctgcattaatgaatcggccaacgcgcggggagaggcggtttgcgtattgggcgctcttccgcttcctcgctcactgactcgctgcgctcggtcgttcggctgcggcgagcggtatcagctcactcaaaggcggtaatacggttatccacagaatcaggggataacgcaggaaagaacatgtgagcaaaaggccagcaaaaggccaggaaccgtaaaaaggccgcgttgctggcgtttttccataggctccgcccccctgacgagcatcacaaaaatcgacgctcaagtcagaggtggcgaaacccgacaggactataaagataccaggcgtttccccctggaagctccctcgtgcgctctcctgttccgaccctgccgcttaccggatacctgtccgcctttctcccttcgggaagcgtggcgctttctcatagctcacgctgtaggtatctcagttcggtgtaggtcgttcgctccaagctgggctgtgtgcacgaaccccccgttcagcccgaccgctgcgccttatccggtaactatcgtcttgagtccaacccggtaagacacgacttatcgccactggcagcagccactggtaacaggattagcagagcgaggtatgtaggcggtgctacagagttcttgaagtggtggcctaactacggctacactagaagaacagtatttggtatctgcgctctgctgaagccagttaccttcggaaaaagagttggtagctcttgatccggcaaacaaaccaccgctggtagcggtggtttttttgtttgcaagcagcagattacgcgcagaaaaaaaggatctcaagaagatcctttgatcttttctacggggtctgacgctcagtggaacgaaaactcacgttaagggattttggtcatgagattatcaaaaaggatcttcacctagatccttttaaattaaaaatgaagttttaaatcaatctaaagtatatatgagtaaacttggtctgacagttaccaatgcttaatcagtgaggcacctatctcagcgatctgtctatttcgttcatccatagttgcctgactccccgtcgtgtagataactacgatacgggagggcttaccatctggccccagtgctgcaatgataccgcgagacccacgctcaccggctccagatttatcagcaataaaccagccagccggaagggccgagcgcagaagtggtcctgcaactttatccgcctccatccagtctattaattgttgccgggaagctagagtaagtagttcgccagttaatagtttgcgcaacgttgttgccattgctacaggcatcgtggtgtcacgctcgtcgtttggtatggcttcattcagctccggttcccaacgatcaaggcgagttacatgatcccccatgttgtgcaaaaaagcggttagctccttcggtcctccgatcgttgtcagaagtaagttggccgcagtgttatcactcatggttatggcagcactgcataattctcttactgtcatgccatccgtaagatgcttttctgtgactggtgagtactcaaccaagtcattctgagaatagtgtatgcggcgaccgagttgctcttgcccggcgtcaatacgggataataccgcgccacatagcagaactttaaaagtgctcatcattggaaaacgttcttcggggcgaaaactctcaaggatcttaccgctgttgagatccagttcgatgtaacccactcgtgcacccaactgatcttcagcatcttttactttcaccagcgtttctgggtgagcaaaaacaggaaggcaaaatgccgcaaaaaagggaataagggcgacacggaaatgttgaatactcatactcttcctttttcaatattattgaagcatttatcagggttattgtctcatgagcggatacatatttgaatgtatttagaaaaataaacaaataggggttccgcgcacatttccccgaaaagtgccacctgggtcgacattgattattgactagtaatagtaatcaattacggggtcattagttcatagcccatatatggagttccg

SEQ ID NO: 365 - DNA, 4778 bp, Artificial Sequence
  Synthetic
cgttacataacttacggtaaatggcccgcctggctgaccgcccaacgacccccgcccattgacgtcaataatgacgtatgttcccatagtaacgccaatagggactttccattgacgtcaatgggtggagtatttacggtaaactgcccacttggcagtacatcaagtgtatcatatgccaagtacgccccctattgacgtcaatgacggtaaatggcccgcctggcattatgcccagtacatgaccttatgggactttcctacttggcagtacatctacgtattagtcatcgctattaccatggtgatgcggttttggcagtacatcaatgggcgtggatagcggtttgactcacggggatttccaagtctccaccccattgacgtcaatgggagtttgttttggcaccaaaatcaacgggactttccaaaatgtcgtaacaactccgccccattgacgcaaatgggcggtaggcgtgtacggtgggaggtctatataagcagagctggtttagtgaaccgtcagatccgctagcgctaccggactcagatcgccaccatgtacccctacgacgtgccagactacgcccctaagaagaagagaaaagtcggcggctctggcggcggaggatctggcggaggtggaagcggaggaatgacccagaagaagaacgacagcaacatccccaactactacctgtacggcaccgtgctgaccagatacggactggccagcctgaaccacgacatcagaagaggcaacaagaccatcctgcagaaaggctactggaacaacggcaagatccacagcttcgtgggcagcagcgccattagatgggccctgaggttctatctgcagaaacagggctacctggtcaacagagtgtgggacgaagaggaacacatcaacagactgaccagcgaggacttcgaccccgagaagttctacgacgacgacatcttcggcttcgccctgctggaaagcgccgagacagaggaagataccagcaccaccaagcggaagaagaagcagaccaagaccagcacacccaaccagagaatgggcgccctgggcatgaatatggccgtgtctctgaccccttacgatggcgccgtgaagctgggagccaagtctggcagagagaaggacagcaccagcctgcacttcaccgagtaccacgccaccagataccagtactacttcggcatcgacgccacacacctgaaggacttcagccggatcctgcctatgatcgacggcatcatgaacctgcctaaagtcggcggcagcagcaatatcttcaactaccctttctgccccgacagcctggtgttccagtggaccaatcacttcgccagctacatcagctactgcttcgagtactgcgaccccaagagcaaagaggccaagctgagccaagagttcatcgacgaggtggaatgcggccagatcgaccctagcaaactgtggatcggcggcaccatcgtgaaggacctgcagcagctggacaacttcgagagcagccctctgaacaaggcccacatctaccggaaccggaacgagatgatcgaggccctgaaaaccgtgatcaagcgcgacctgggcctcgaggaatccaagtaactagcataaccccttggggcgcactcctcaggtgcaggctgcctatcagaaggtggtggctggtgtggccaatgccctggctcacaaataccactgagatctttttccctctgccaaaaattatggggacatcatgaagccccttgagcatctgacttctggctaataaaggaaatttattttcattgcaatagtgtgttggaattttttgtgtctctcactcggaaggacatatgggagggcaaatcatttaaaacatcagaatgagtatttggtttagagtttggcaacatatgcccatatgctggctgccatgaacaaaggttggctataaagaggtcatcagtatatgaaacagccccctgctgtccattccttattccatagaaaagccttgacttgaggttagattttttttatattttgttttgtgttatttttttctttaacatccctaaaattttccttacatgttttactagccagatttttcctcctctcctgactactcccagtcatagctgtccctcttctcttatggagatccctcgacctgcagcccaagcttggcgtaatcatggtcatagctgtttcctgtgtgaaattgttatccgctcacaattccacacaacatacgagccggaagcataaagtgtaaagcctggggtgcctaatgagtgagctaactcacattaattgcgttgcgctcactgcccgctttccagtcgggaaacctgtcgtgccagcggatccgcatctcaattagtcagcaaccatagtcccgcccctaactccgcccatcccgcccctaactccgcccagttccgcccattctccgccccatggctgactaattttttttatttatgcagaggccgaggccgcctcggcctctgagctattccagaagtagtgaggaggcttttttggaggcctaggcttttgcaaaaagctaacttgtttattgcagcttataatggttacaaataaagcaatagcatcacaaatttcacaaataaagcatttttttcactgcattctagttgtggtttgtccaaactcatcaatgtatcttatcatgtctggatccgctgcattaatgaatcggccaacgcgcggggagaggcggtttgcgtattgggcgctcttccgcttcctcgctcactgactcgctgcgctcggtcgttcggctgcggcgagcggtatcagctcactcaaaggcggtaatacggttatccacagaatcaggggataacgcaggaaagaacatgtgagcaaaaggccagcaaaaggccaggaaccgtaaaaaggccgcgttgctggcgtttttccataggctccgcccccctgacgagcatcacaaaaatcgacgctcaagtcagaggtggcgaaacccgacaggactataaagataccaggcgtttccccctggaagctccctcgtgcgctctcctgttccgaccctgccgcttaccggatacctgtccgcctttctcccttcgggaagcgtggcgctttctcatagctcacgctgtaggtatctcagttcggtgtaggtcgttcgctccaagctgggctgtgtgcacgaaccccccgttcagcccgaccgctgcgccttatccggtaactatcgtcttgagtccaacccggtaagacacgacttatcgccactggcagcagccactggtaacaggattagcagagcgaggtatgtaggcggtgctacagagttcttgaagtggtggcctaactacggctacactagaagaacagtatttggtatctgcgctctgctgaagccagttaccttcggaaaaagagttggtagctcttgatccggcaaacaaaccaccgctggtagcggtggtttttttgtttgcaagcagcagattacgcgcagaaaaaaaggatctcaagaagatcctttgatcttttctacggggtctgacgctcagtggaacgaaaactcacgttaagggattttggtcatgagattatcaaaaaggatcttcacctagatccttttaaattaaaaatgaagttttaaatcaatctaaagtatatatgagtaaacttggtctgacagttaccaatgcttaatcagtgaggcacctatctcagcgatctgtctatttcgttcatccatagttgcctgactccccgtcgtgtagataactacgatacgggagggcttaccatctggccccagtgctgcaatgataccgcgagacccacgctcaccggctccagatttatcagcaataaaccagccagccggaagggccgagcgcagaagtggtcctgcaactttatccgcctccatccagtctattaattgttgccgggaagctagagtaagtagttcgccagttaatagtttgcgcaacgttgttgccattgctacaggcatcgtggtgtcacgctcgtcgtttggtatggcttcattcagctccggttcccaacgatcaaggcgagttacatgatcccccatgttgtgcaaaaaagcggttagctccttcggtcctccgatcgttgtcagaagtaagttggccgcagtgttatcactcatggttatggcagcactgcataattctcttactgtcatgccatccgtaagatgcttttctgtgactggtgagtactcaaccaagtcattctgagaatagtgtatgcggcgaccgagttgctcttgcccggcgtcaatacgggataataccgcgccacatagcagaactttaaaagtgctcatcattggaaaacgttcttcggggcgaaaactctcaaggatcttaccgctgttgagatccagttcgatgtaacccactcgtgcacccaactgatcttcagcatcttttactttcaccagcgtttctgggtgagcaaaaacaggaaggcaaaatgccgcaaaaaagggaataagggcgacacggaaatgttgaatactcatactcttcctttttcaatattattgaagcatttatcagggttattgtctcatgagcggatacatatttgaatgtatttagaaaaataaacaaataggggttccgcgcacatttccccgaaaagtgccacctgggtcgacattgattattgactagtaatagtaatcaattacggggtcattagttcatagcccatatatggagttccg

SEQ ID NO: 366 - DNA, 5387 bp, Artificial Sequence
  Synthetic
cgttacataacttacggtaaatggcccgcctggctgaccgcccaacgacccccgcccattgacgtcaataatgacgtatgttcccatagtaacgccaatagggactttccattgacgtcaatgggtggagtatttacggtaaactgcccacttggcagtacatcaagtgtatcatatgccaagtacgccccctattgacgtcaatgacggtaaatggcccgcctggcattatgcccagtacatgaccttatgggactttcctacttggcagtacatctacgtattagtcatcgctattaccatggtgatgcggttttggcagtacatcaatgggcgtggatagcggtttgactcacggggatttccaagtctccaccccattgacgtcaatgggagtttgttttggcaccaaaatcaacgggactttccaaaatgtcgtaacaactccgccccattgacgcaaatgggcggtaggcgtgtacggtgggaggtctatataagcagagctggtttagtgaaccgtcagatccgctagcgctaccggactcagatcgccaccatgtacccctacgacgtgccagactacgcccctaagaagaagagaaaagtcggcggctctggcggcggaggatctggcggaggtggaagcggaggaatcgtgtccacacagcccaagatcagcctgtctctgcacgccgccgataccaccatcatgcacagagtgggcatgaccggcctgtacatgaccctgaagcggctggaaaagcagtaccctctgagcagacagagaggcggccacatcagctggtttctgaccgccgacaccatcgagctgttttgggagggcagcgactttatcgccctgagctggctgatcaacgagagctttcagctggacgacaccggcctgatccacctcgttggcctggacaacgaccggatcgacctgagacagaagatccacatccacgagggaatctgcggcgtgttcctgcggctgaacaagttttaccaggccggcgagatcatcaacaccgagctgagattcgaagagaagcaggtcgagtaccagtacaagagcctgacttggtacgcccaccagaccttcgccgagaagctgtgcgaagccgatacacagcagctgcggcacgactacatccagatcaccagctggctgtacctcggcggaattgtgcggcatgccagaacacagaacaccaccaagctggaagagaaacccgagtacgccctggctctgctgtttgtgcctgtcgtgtgccactactgcctgctgcacatccctagcgaggacctgaaagagcggaagccccacagatacctggtggtcatccccgagatcaaggacttcgaggatgccagccagagaagatggcggctgcagcagctggaaacaaagcagttccacgtgtccagcctgggcgaagccggcctgctgtactacagcctggatgacattcagcccgaggtggcctactaccaggcctgtcaagtgtggctgtacgaaaagaccaacaaggccagccggcagcggaccctgatgagcatcgaggaaatcaagatcgacaagaacatcctcatcacctaccagcaggtccagaagtactttaagaccaactaccagatcattaagtacaagcagatcttcatcaaagtgaaccccattcggagcctgatcgccgacaatctggtcaagggaatccactggtggtccaatttctgggagaagctggtcatcgaggacagcaaagagtacctgttcaaccagctgttcagcaaccgcgagggcttcatcatcatggccgagaacagcgaagaggacaagcagtatctgatctttatcaaggtgttccagcaggccatgaagggcaacttcgccaagatctacgccaagaccgaggaaggcaaggaccctcctatcaagaaaaaggtggaacggctgcgggccgagctgaactactgttacgatgagctgagcttcaaagaatacctgagcgacttcctcgtcagaggcggactgaacaaatacttcaacgagcaccaagaggaaatcgccctgctgatcaagaagtccccttggcaagagatcagaatctggtccctgctggccattgccagctacaagcccaaggacaagctgaccaaccgggacgatagcagcctgagcaacaaccagaaactggaagaagtgaacgacgacagcgaggaagagtgactagcataaccccttggggcgcactcctcaggtgcaggctgcctatcagaaggtggtggctggtgtggccaatgccctggctcacaaataccactgagatctttttccctctgccaaaaattatggggacatcatgaagccccttgagcatctgacttctggctaataaaggaaatttattttcattgcaatagtgtgttggaattttttgtgtctctcactcggaaggacatatgggagggcaaatcatttaaaacatcagaatgagtatttggtttagagtttggcaacatatgcccatatgctggctgccatgaacaaaggttggctataaagaggtcatcagtatatgaaacagccccctgctgtccattccttattccatagaaaagccttgacttgaggttagattttttttatattttgttttgtgttatttttttctttaacatccctaaaattttccttacatgttttactagccagatttttcctcctctcctgactactcccagtcatagctgtccctcttctcttatggagatccctcgacctgcagcccaagcttggcgtaatcatggtcatagctgtttcctgtgtgaaattgttatccgctcacaattccacacaacatacgagccggaagcataaagtgtaaagcctggggtgcctaatgagtgagctaactcacattaattgcgttgcgctcactgcccgctttccagtcgggaaacctgtcgtgccagcggatccgcatctcaattagtcagcaaccatagtcccgcccctaactccgcccatcccgcccctaactccgcccagttccgcccattctccgccccatggctgactaattttttttatttatgcagaggccgaggccgcctcggcctctgagctattccagaagtagtgaggaggcttttttggaggcctaggcttttgcaaaaagctaacttgtttattgcagcttataatggttacaaataaagcaatagcatcacaaatttcacaaataaagcatttttttcactgcattctagttgtggtttgtccaaactcatcaatgtatcttatcatgtctggatccgctgcattaatgaatcggccaacgcgcggggagaggcggtttgcgtattgggcgctcttccgcttcctcgctcactgactcgctgcgctcggtcgttcggctgcggcgagcggtatcagctcactcaaaggcggtaatacggttatccacagaatcaggggataacgcaggaaagaacatgtgagcaaaaggccagcaaaaggccaggaaccgtaaaaaggccgcgttgctggcgtttttccataggctccgcccccctgacgagcatcacaaaaatcgacgctcaagtcagaggtggcgaaacccgacaggactataaagataccaggcgtttccccctggaagctccctcgtgcgctctcctgttccgaccctgccgcttaccggatacctgtccgcctttctcccttcgggaagcgtggcgctttctcatagctcacgctgtaggtatctcagttcggtgtaggtcgttcgctccaagctgggctgtgtgcacgaaccccccgttcagcccgaccgctgcgccttatccggtaactatcgtcttgagtccaacccggtaagacacgacttatcgccactggcagcagccactggtaacaggattagcagagcgaggtatgtaggcggtgctacagagttcttgaagtggtggcctaactacggctacactagaagaacagtatttggtatctgcgctctgctgaagccagttaccttcggaaaaagagttggtagctcttgatccggcaaacaaaccaccgctggtagcggtggtttttttgtttgcaagcagcagattacgcgcagaaaaaaaggatctcaagaagatcctttgatcttttctacggggtctgacgctcagtggaacgaaaactcacgttaagggattttggtcatgagattatcaaaaaggatcttcacctagatccttttaaattaaaaatgaagttttaaatcaatctaaagtatatatgagtaaacttggtctgacagttaccaatgcttaatcagtgaggcacctatctcagcgatctgtctatttcgttcatccatagttgcctgactccccgtcgtgtagataactacgatacgggagggcttaccatctggccccagtgctgcaatgataccgcgagacccacgctcaccggctccagatttatcagcaataaaccagccagccggaagggccgagcgcagaagtggtcctgcaactttatccgcctccatccagtctattaattgttgccgggaagctagagtaagtagttcgccagttaatagtttgcgcaacgttgttgccattgctacaggcatcgtggtgtcacgctcgtcgtttggtatggcttcattcagctccggttcccaacgatcaaggcgagttacatgatcccccatgttgtgcaaaaaagcggttagctccttcggtcctccgatcgttgtcagaagtaagttggccgcagtgttatcactcatggttatggcagcactgcataattctcttactgtcatgccatccgtaagatgcttttctgtgactggtgagtactcaaccaagtcattctgagaatagtgtatgcggcgaccgagttgctcttgcccggcgtcaatacgggataataccgcgccacatagcagaactttaaaagtgctcatcattggaaaacgttcttcggggcgaaaactctcaaggatcttaccgctgttgagatccagttcgatgtaacccactcgtgcacccaactgatcttcagcatcttttactttcaccagcgtttctgggtgagcaaaaacaggaaggcaaaatgccgcaaaaaagggaataagggcgacacggaaatgttgaatactcatactcttcctttttcaatattattgaagcatttatcagggttattgtctcatgagcggatacatatttgaatgtatttagaaaaataaacaaataggggttccgcgcacatttccccgaaaagtgccacctgggtcgacattgattattgactagtaatagtaatcaattacggggtcattagttcatagcccatatatggagttccg

SEQ ID NO: 367 - DNA, 4796 bp, Artificial Sequence
  Synthetic
cgttacataacttacggtaaatggcccgcctggctgaccgcccaacgacccccgcccattgacgtcaataatgacgtatgttcccatagtaacgccaatagggactttccattgacgtcaatgggtggagtatttacggtaaactgcccacttggcagtacatcaagtgtatcatatgccaagtacgccccctattgacgtcaatgacggtaaatggcccgcctggcattatgcccagtacatgaccttatgggactttcctacttggcagtacatctacgtattagtcatcgctattaccatggtgatgcggttttggcagtacatcaatgggcgtggatagcggtttgactcacggggatttccaagtctccaccccattgacgtcaatgggagtttgttttggcaccaaaatcaacgggactttccaaaatgtcgtaacaactccgccccattgacgcaaatgggcggtaggcgtgtacggtgggaggtctatataagcagagctggtttagtgaaccgtcagatccgctagcgctaccggactcagatcgccaccatgtacccctacgacgtgccagactacgcccctaagaagaagagaaaagtcggcggctctggcggcggaggatctggcggaggtggaagcggaggaaccatctacagcgagcactggtccctgaatcctctggaaatccctcagcggagccggctgtttagcctggaacctgtggctgtgggcacaccttatgccgagagcctgagcagctacctgcacagactggcccaggctcactgtctgacaagcgagaagctggtcatgggcgagatcgcccctctgatcctgaaggacgaggacaagagcgagctgctgagcaagaacctgagccatctgctgggcaacagcgacgccaagcctgccatcaatggcatgagagagatgaccgagaagctcgtgaccgtgctggaagaactgaccatgcggcaggacctgcggtttctgacactgctgtcttggaagggcatgatctacgacaagggcctgttccgcaactacagagcctggtgtccttgctgctgcgaggaatggatgcagaagaacaagacaatctacgagcccctgagctggtccttcaaggacgtggaattctgcctgatccacaagcagcggctgatcgaggaatgcagccattgtggcgctagactgcccgtgatggccagactttctcctgccggcttctgcagcagatgctatggctggctgggccaagagatcaagggcgaagaggaaatcgagaagtaccgcgtgaacatccagggcatctccgagctgattgccctgacacctcagctgggctacaagcccattcctatcgagctgacccggaaactgcagctgatcctgctggtgttcgagcaggccatcggcaaggatgtgaagctgctgggagatctcggcggcatcatggaaagcctgagaatcgccagcaccaccaaccagagccagccttaccacctggtcaagctgatcatccccgtgtgcgagaaggccaagatcagcgtgttccagctgttcggcagcgacttcaaagagctgggcaagatcctgtttggcaacttctccctggaactgaaactgtgactagcataaccccttggggcgcactcctcaggtgcaggctgcctatcagaaggtggtggctggtgtggccaatgccctggctcacaaataccactgagatctttttccctctgccaaaaattatggggacatcatgaagccccttgagcatctgacttctggctaataaaggaaatttattttcattgcaatagtgtgttggaattttttgtgtctctcactcggaaggacatatgggagggcaaatcatttaaaacatcagaatgagtatttggtttagagtttggcaacatatgcccatatgctggctgccatgaacaaaggttggctataaagaggtcatcagtatatgaaacagccccctgctgtccattccttattccatagaaaagccttgacttgaggttagattttttttatattttgttttgtgttatttttttctttaacatccctaaaattttccttacatgttttactagccagatttttcctcctctcctgactactcccagtcatagctgtccctcttctcttatggagatccctcgacctgcagcccaagcttggcgtaatcatggtcatagctgtttcctgtgtgaaattgttatccgctcacaattccacacaacatacgagccggaagcataaagtgtaaagcctggggtgcctaatgagtgagctaactcacattaattgcgttgcgctcactgcccgctttccagtcgggaaacctgtcgtgccagcggatccgcatctcaattagtcagcaaccatagtcccgcccctaactccgcccatcccgcccctaactccgcccagttccgcccattctccgccccatggctgactaattttttttatttatgcagaggccgaggccgcctcggcctctgagctattccagaagtagtgaggaggcttttttggaggcctaggcttttgcaaaaagctaacttgtttattgcagcttataatggttacaaataaagcaatagcatcacaaatttcacaaataaagcatttttttcactgcattctagttgtggtttgtccaaactcatcaatgtatcttatcatgtctggatccgctgcattaatgaatcggccaacgcgcggggagaggcggtttgcgtattgggcgctcttccgcttcctcgctcactgactcgctgcgctcggtcgttcggctgcggcgagcggtatcagctcactcaaaggcggtaatacggttatccacagaatcaggggataacgcaggaaagaacatgtgagcaaaaggccagcaaaaggccaggaaccgtaaaaaggccgcgttgctggcgtttttccataggctccgcccccctgacgagcatcacaaaaatcgacgctcaagtcagaggtggcgaaacccgacaggactataaagataccaggcgtttccccctggaagctccctcgtgcgctctcctgttccgaccctgccgcttaccggatacctgtccgcctttctcccttcgggaagcgtggcgctttctcatagctcacgctgtaggtatctcagttcggtgtaggtcgttcgctccaagctgggctgtgtgcacgaaccccccgttcagcccgaccgctgcgccttatccggtaactatcgtcttgagtccaacccggtaagacacgacttatcgccactggcagcagccactggtaacaggattagcagagcgaggtatgtaggcggtgctacagagttcttgaagtggtggcctaactacggctacactagaagaacagtatttggtatctgcgctctgctgaagccagttaccttcggaaaaagagttggtagctcttgatccggcaaacaaaccaccgctggtagcggtggtttttttgtttgcaagcagcagattacgcgcagaaaaaaaggatctcaagaagatcctttgatcttttctacggggtctgacgctcagtggaacgaaaactcacgttaagggattttggtcatgagattatcaaaaaggatcttcacctagatccttttaaattaaaaatgaagttttaaatcaatctaaagtatatatgagtaaacttggtctgacagttaccaatgcttaatcagtgaggcacctatctcagcgatctgtctatttcgttcatccatagttgcctgactccccgtcgtgtagataactacgatacgggagggcttaccatctggccccagtgctgcaatgataccgcgagacccacgctcaccggctccagatttatcagcaataaaccagccagccggaagggccgagcgcagaagtggtcctgcaactttatccgcctccatccagtctattaattgttgccgggaagctagagtaagtagttcgccagttaatagtttgcgcaacgttgttgccattgctacaggcatcgtggtgtcacgctcgtcgtttggtatggcttcattcagctccggttcccaacgatcaaggcgagttacatgatcccccatgttgtgcaaaaaagcggttagctccttcggtcctccgatcgttgtcagaagtaagttggccgcagtgttatcactcatggttatggcagcactgcataattctcttactgtcatgccatccgtaagatgcttttctgtgactggtgagtactcaaccaagtcattctgagaatagtgtatgcggcgaccgagttgctcttgcccggcgtcaatacgggataataccgcgccacatagcagaactttaaaagtgctcatcattggaaaacgttcttcggggcgaaaactctcaaggatcttaccgctgttgagatccagttcgatgtaacccactcgtgcacccaactgatcttcagcatcttttactttcaccagcgtttctgggtgagcaaaaacaggaaggcaaaatgccgcaaaaaagggaataagggcgacacggaaatgttgaatactcatactcttcctttttcaatattattgaagcatttatcagggttattgtctcatgagcggatacatatttgaatgtatttagaaaaataaacaaataggggttccgcgcacatttccccgaaaagtgccacctgggtcgacattgattattgactagtaatagtaatcaattacggggtcattagttcatagcccatatatggagttccg

SEQ ID NO: 368 - DNA, 6503 bp, Artificial Sequence
  Synthetic
cgttacataacttacggtaaatggcccgcctggctgaccgcccaacgacccccgcccattgacgtcaataatgacgtatgttcccatagtaacgccaatagggactttccattgacgtcaatgggtggagtatttacggtaaactgcccacttggcagtacatcaagtgtatcatatgccaagtacgccccctattgacgtcaatgacggtaaatggcccgcctggcattatgcccagtacatgaccttatgggactttcctacttggcagtacatctacgtattagtcatcgctattaccatggtgatgcggttttggcagtacatcaatgggcgtggatagcggtttgactcacggggatttccaagtctccaccccattgacgtcaatgggagtttgttttggcaccaaaatcaacgggactttccaaaatgtcgtaacaactccgccccattgacgcaaatgggcggtaggcgtgtacggtgggaggtctatataagcagagctggtttagtgaaccgtcagatccgctagcgctaccggactcagatcgccaccatgtacccctacgacgtgccagactacgcccctaagaagaagagaaaagtcggcggctctggcggcggaggatctggcggaggtggaagcggaggaaaggaacagttcgagcagtgggtcgcccggctgcagatttctgaagccggccagaaaatcatcgagaaagtgcggagcagcgagcccagcagaagagttggcggaggcagcaagaatgtgtccggcagatacccctccagaaagatgggcgtgaccatccagttcgagagccacagagtggaactgcccatcatctaccagctggaacacgacaaggacgtgctggaattctacgaccagcctcctcagatcaagctggactaccaggccagcaatggcagacgactgggagtgctgcacacccctgatctgttcgtgatcaggaccaatagcgccggctgggaagagtgcaagaccgagcaggatctgaagaagctggccgagaagaaccccaaccggtacttctacagcgaagagaacaaccagtggcacagcctgcctggcgaggtgtacgccaatcagtttggcctgtaccaccggatccacagcgaccgcgaaatcaactgggtgctgcagcggaacctgcagttcctggaagattactaccgcagcgagagcctggtggtggaagaggccattgctcagtctctgctggccatcgtgtctagccagcctggaattacactggccgagctgctgaacagaagcaccggcgccaagagcgacgacatctacaccctgatcatccaagagcagatctacatcgacctgaacgccacacctctggctgagcctgagagatgcctgatcttcagggatgagcagaccgccagcgcctacagactgatggttgagcagcctagcgtgtccctgcctgccatctctcccgtggtcaatattgtgacaggcgccaccgtgtcctgggatggcaagggcctgaatatcatccacgtgggcgagacagaagtgatcctgggcgccgagaacaatcagctcatcgaactgaagaaggccatcttcgagaacctcgtgcggcagggcaagatcacctctctgcagaccccagagaaaaccgccatcagcacagagagctggcagcggtttcatcaggcctctccagaggatcaggccgaggctctggaacggtacaagaccatcgagccctacctgaacggacaccctcctgagaacgagacaatccccgccagaaccatcagacactggaaggccaagtacctgatcgccatccagaagtacggctgcggctatatcggcctgctgtcccacagaagcgtgaagggcaacagacagagaaagctgcccgaggacaccctggccatcatggaaaagttcattctcgaggactacgagacactgaagcagaaacggatgtgggaagtgcacgccgctctcgtgcgagcttgtgaagaagcaggcgttatcgcccctagctacaaggccttcaccaaagaggtgcagcggagaaccggctacgagcagaccaagaagagacaaggcagaagggccgcctaccagcacgagtccttttactgggaactcgccatcaccacacctcggcacggcgatagacctttcgagatcggccacatcgaccacaccgagctggatgtggaactcgtgtgtagcgacaccggcagaaacctgggtagaccttgggccacctttctggtggacgcctactctagaaggctgctggccgtgtacctgaccttcgacagcccaagctaccggtcctgtctcatggtgctgcggatctgcgtgaagaggcatggcagactgcctcagatcgtggtggtcgataatggcgccgagtttcacagcgtgtacttcgaaaccctgctggctaccttcgagtgcaccaagaagcagcggcctccagccaaggccagatttggcagcgtgtgcgagagactgttcggcaccagcaacacccagttcgtgcacaacctgctgggcaatacccagatcacccggaacgtgcggcaagtgaccaagagcgtgaaccccaagaacctggctgtgtggacactgggactgctgtacgagtacctgtgtgcctgggcctacgaagtgtacgataccgacgaacaccccgctctgtttcagagccctagggatgcctttgccgccggaatggctatcggcggatctcgggtgcacagaatgatcccttacgacgagaacttccagatcctgacactgcccaccacctccgagggcaaagccaaggtgcaagtcggcagaggcatcaagatcaactacatctactactggtccaacagcttcagggacccacagatcgagaacaccagcgtgcagatcagatacgaccccttcaacatcggaatcgcctacgccttcgtcagaggccagtgggtgcagtgcatcagccagtactacgccgaactccagggcagaagcgagaaagagctgaaactggccagcatcgagctgcggaagcactacagcaatcacacccagcagagcaaggtgtccgccaaaaacctggccgagttcctggcaagcgtggaagctcaagaagccctgctggaacagagaagctacgacgccgaagtgaaagaggtgttccgggtcatcgaaggcggcaaggccacaaccagcagaaatgaggaacccaagctgatccaagtgaccttcgccaacaccgacttccaggccgatgaggacgaagccatcgtgcctgaaacactggtggtgtacgaggaattctgactagcataaccccttggggcgcactcctcaggtgcaggctgcctatcagaaggtggtggctggtgtggccaatgccctggctcacaaataccactgagatctttttccctctgccaaaaattatggggacatcatgaagccccttgagcatctgacttctggctaataaaggaaatttattttcattgcaatagtgtgttggaattttttgtgtctctcactcggaaggacatatgggagggcaaatcatttaaaacatcagaatgagtatttggtttagagtttggcaacatatgcccatatgctggctgccatgaacaaaggttggctataaagaggtcatcagtatatgaaacagccccctgctgtccattccttattccatagaaaagccttgacttgaggttagattttttttatattttgttttgtgttatttttttctttaacatccctaaaattttccttacatgttttactagccagatttttcctcctctcctgactactcccagtcatagctgtccctcttctcttatggagatccctcgacctgcagcccaagcttggcgtaatcatggtcatagctgtttcctgtgtgaaattgttatccgctcacaattccacacaacatacgagccggaagcataaagtgtaaagcctggggtgcctaatgagtgagctaactcacattaattgcgttgcgctcactgcccgctttccagtcgggaaacctgtcgtgccagcggatccgcatctcaattagtcagcaaccatagtcccgcccctaactccgcccatcccgcccctaactccgcccagttccgcccattctccgccccatggctgactaattttttttatttatgcagaggccgaggccgcctcggcctctgagctattccagaagtagtgaggaggcttttttggaggcctaggcttttgcaaaaagctaacttgtttattgcagcttataatggttacaaataaagcaatagcatcacaaatttcacaaataaagcatttttttcactgcattctagttgtggtttgtccaaactcatcaatgtatcttatcatgtctggatccgctgcattaatgaatcggccaacgcgcggggagaggcggtttgcgtattgggcgctcttccgcttcctcgctcactgactcgctgcgctcggtcgttcggctgcggcgagcggtatcagctcactcaaaggcggtaatacggttatccacagaatcaggggataacgcaggaaagaacatgtgagcaaaaggccagcaaaaggccaggaaccgtaaaaaggccgcgttgctggcgtttttccataggctccgcccccctgacgagcatcacaaaaatcgacgctcaagtcagaggtggcgaaacccgacaggactataaagataccaggcgtttccccctggaagctccctcgtgcgctctcctgttccgaccctgccgcttaccggatacctgtccgcctttctcccttcgggaagcgtggcgctttctcatagctcacgctgtaggtatctcagttcggtgtaggtcgttcgctccaagctgggctgtgtgcacgaaccccccgttcagcccgaccgctgcgccttatccggtaactatcgtcttgagtccaacccggtaagacacgacttatcgccactggcagcagccactggtaacaggattagcagagcgaggtatgtaggcggtgctacagagttcttgaagtggtggcctaactacggctacactagaagaacagtatttggtatctgcgctctgctgaagccagttaccttcggaaaaagagttggtagctcttgatccggcaaacaaaccaccgctggtagcggtggtttttttgtttgcaagcagcagattacgcgcagaaaaaaaggatctcaagaagatcctttgatcttttctacggggtctgacgctcagtggaacgaaaactcacgttaagggattttggtcatgagattatcaaaaaggatcttcacctagatccttttaaattaaaaatgaagttttaaatcaatctaaagtatatatgagtaaacttggtctgacagttaccaatgcttaatcagtgaggcacctatctcagcgatctgtctatttcgttcatccatagttgcctgactccccgtcgtgtagataactacgatacgggagggcttaccatctggccccagtgctgcaatgataccgcgagacccacgctcaccggctccagatttatcagcaataaaccagccagccggaagggccgagcgcagaagtggtcctgcaactttatccgcctccatccagtctattaattgttgccgggaagctagagtaagtagttcgccagttaatagtttgcgcaacgttgttgccattgctacaggcatcgtggtgtcacgctcgtcgtttggtatggcttcattcagctccggttcccaacgatcaaggcgagttacatgatcccccatgttgtgcaaaaaagcggttagctccttcggtcctccgatcgttgtcagaagtaagttggccgcagtgttatcactcatggttatggcagcactgcataattctcttactgtcatgccatccgtaagatgcttttctgtgactggtgagtactcaaccaagtcattctgagaatagtgtatgcggcgaccgagttgctcttgcccggcgtcaatacgggataataccgcgccacatagcagaactttaaaagtgctcatcattggaaaacgttcttcggggcgaaaactctcaaggatcttaccgctgttgagatccagttcgatgtaacccactcgtgcacccaactgatcttcagcatcttttactttcaccagcgtttctgggtgagcaaaaacaggaaggcaaaatgccgcaaaaaagggaataagggcgacacggaaatgttgaatactcatactcttcctttttcaatattattgaagcatttatcagggttattgtctcatgagcggatacatatttgaatgtatttagaaaaataaacaaataggggttccgcgcacatttccccgaaaagtgccacctgggtcgacattgattattgactagtaatagtaatcaattacggggtcattagttcatagcccatatatggagttccg

SEQ ID NO: 369 - DNA, 4958 bp, Artificial Sequence
  Synthetic
cgttacataacttacggtaaatggcccgcctggctgaccgcccaacgacccccgcccattgacgtcaataatgacgtatgttcccatagtaacgccaatagggactttccattgacgtcaatgggtggagtatttacggtaaactgcccacttggcagtacatcaagtgtatcatatgccaagtacgccccctattgacgtcaatgacggtaaatggcccgcctggcattatgcccagtacatgaccttatgggactttcctacttggcagtacatctacgtattagtcatcgctattaccatggtgatgcggttttggcagtacatcaatgggcgtggatagcggtttgactcacggggatttccaagtctccaccccattgacgtcaatgggagtttgttttggcaccaaaatcaacgggactttccaaaatgtcgtaacaactccgccccattgacgcaaatgggcggtaggcgtgtacggtgggaggtctatataagcagagctggtttagtgaaccgtcagatccgctagcgctaccggactcagatcgccaccatgtacccctacgacgtgccagactacgcccctaagaagaagagaaaagtcggcggctctggcggcggaggatctggcggaggtggaagcggaggaaccaagagcaccggctttccactggaactgctgaccagacctgccaccgagagactggcctacttcgagaactacaccgtggctcaccccagactgaaagaggtgtacgagatcctgatgcggacaatcgccgaacctgccggcgctagcttcatctttgtgtatggcgctagcggcgtgggcaagaccacactgagactgagagtggaacagaagctgaccgagctggccctgcctaagctggaaagcgatagagccagagtgcccgtcgtgggcattgaggctattgcccctgagagccggtacttcaactggaaagagtactacacacgggccctgatcaccctggaagaacccctgatcgaccacaagttcgactatggcgtgcggggcatcagcagagacaacttcggcaagatcaacgtggaaagcaaggtggtggcccctgctctgagaagggccctcgaaaatgccctgatccacagacaccccgacgtgttctttgtggacgaggcccagcactttggcaaggtggcctctggctacaagctgcaggatcagctggactgcctgaagtccctggccaacatgacaggcatcctgcactgtctgctgggcacctacgagctgctgaccttcagaaatctgagcggccagctgtctcggcggagcgtggacatccacttcagaagatactgcgccgactctcccgaggacgtgcaggcctttaaaagcgtgctgctgacattccagcagcatctgcctctggccgagacacccaatctggtggatcactgggagtacttctacgagagaaccctgggctgcatcggcaccctgaaggactggctgaagagagtgctgagcgacgccctggatagagaggccacaaccatcacactgaaggacctgcagaaaagggccctgagcgtggcccagtgccagaagatgttcaaagagatccaagagggcgaacgccagctgagcgaaacagaggccgatgtgcagaacctgagatctgcccttggcctgggagccaagcctatcgttctgcctgaggaaacccctaagaccaccagacctccaggcaaagtgggcaaaagaaagcccaagagggaccccatcggagtgcagcaggatgtgtcttgactagcataaccccttggggcgcactcctcaggtgcaggctgcctatcagaaggtggtggctggtgtggccaatgccctggctcacaaataccactgagatctttttccctctgccaaaaattatggggacatcatgaagccccttgagcatctgacttctggctaataaaggaaatttattttcattgcaatagtgtgttggaattttttgtgtctctcactcggaaggacatatgggagggcaaatcatttaaaacatcagaatgagtatttggtttagagtttggcaacatatgcccatatgctggctgccatgaacaaaggttggctataaagaggtcatcagtatatgaaacagccccctgctgtccattccttattccatagaaaagccttgacttgaggttagattttttttatattttgttttgtgttatttttttctttaacatccctaaaattttccttacatgttttactagccagatttttcctcctctcctgactactcccagtcatagctgtccctcttctcttatggagatccctcgacctgcagcccaagcttggcgtaatcatggtcatagctgtttcctgtgtgaaattgttatccgctcacaattccacacaacatacgagccggaagcataaagtgtaaagcctggggtgcctaatgagtgagctaactcacattaattgcgttgcgctcactgcccgctttccagtcgggaaacctgtcgtgccagcggatccgcatctcaattagtcagcaaccatagtcccgcccctaactccgcccatcccgcccctaactccgcccagttccgcccattctccgccccatggctgactaattttttttatttatgcagaggccgaggccgcctcggcctctgagctattccagaagtagtgaggaggcttttttggaggcctaggcttttgcaaaaagctaacttgtttattgcagcttataatggttacaaataaagcaatagcatcacaaatttcacaaataaagcatttttttcactgcattctagttgtggtttgtccaaactcatcaatgtatcttatcatgtctggatccgctgcattaatgaatcggccaacgcgcggggagaggcggtttgcgtattgggcgctcttccgcttcctcgctcactgactcgctgcgctcggtcgttcggctgcggcgagcggtatcagctcactcaaaggcggtaatacggttatccacagaatcaggggataacgcaggaaagaacatgtgagcaaaaggccagcaaaaggccaggaaccgtaaaaaggccgcgttgctggcgtttttccataggctccgcccccctgacgagcatcacaaaaatcgacgctcaagtcagaggtggcgaaacccgacaggactataaagataccaggcgtttccccctggaagctccctcgtgcgctctcctgttccgaccctgccgcttaccggatacctgtccgcctttctcccttcgggaagcgtggcgctttctcatagctcacgctgtaggtatctcagttcggtgtaggtcgttcgctccaagctgggctgtgtgcacgaaccccccgttcagcccgaccgctgcgccttatccggtaactatcgtcttgagtccaacccggtaagacacgacttatcgccactggcagcagccactggtaacaggattagcagagcgaggtatgtaggcggtgctacagagttcttgaagtggtggcctaactacggctacactagaagaacagtatttggtatctgcgctctgctgaagccagttaccttcggaaaaagagttggtagctcttgatccggcaaacaaaccaccgctggtagcggtggtttttttgtttgcaagcagcagattacgcgcagaaaaaaaggatctcaagaagatcctttgatcttttctacggggtctgacgctcagtggaacgaaaactcacgttaagggattttggtcatgagattatcaaaaaggatcttcacctagatccttttaaattaaaaatgaagttttaaatcaatctaaagtatatatgagtaaacttggtctgacagttaccaatgcttaatcagtgaggcacctatctcagcgatctgtctatttcgttcatccatagttgcctgactccccgtcgtgtagataactacgatacgggagggcttaccatctggccccagtgctgcaatgataccgcgagacccacgctcaccggctccagatttatcagcaataaaccagccagccggaagggccgagcgcagaagtggtcctgcaactttatccgcctccatccagtctattaattgttgccgggaagctagagtaagtagttcgccagttaatagtttgcgcaacgttgttgccattgctacaggcatcgtggtgtcacgctcgtcgtttggtatggcttcattcagctccggttcccaacgatcaaggcgagttacatgatcccccatgttgtgcaaaaaagcggttagctccttcggtcctccgatcgttgtcagaagtaagttggccgcagtgttatcactcatggttatggcagcactgcataattctcttactgtcatgccatccgtaagatgcttttctgtgactggtgagtactcaaccaagtcattctgagaatagtgtatgcggcgaccgagttgctcttgcccggcgtcaatacgggataataccgcgccacatagcagaactttaaaagtgctcatcattggaaaacgttcttcggggcgaaaactctcaaggatcttaccgctgttgagatccagttcgatgtaacccactcgtgcacccaactgatcttcagcatcttttactttcaccagcgtttctgggtgagcaaaaacaggaaggcaaaatgccgcaaaaaagggaataagggcgacacggaaatgttgaatactcatactcttcctttttcaatattattgaagcatttatcagggttattgtctcatgagcggatacatatttgaatgtatttagaaaaataaacaaataggggttccgcgcacatttccccgaaaagtgccacctgggtcgacattgattattgactagtaatagtaatcaattacggggtcattagttcatagcccatatatggagttccg

SEQ ID NO: 370 - DNA, 4445 bp, Artificial Sequence
  Synthetic
cgttacataacttacggtaaatggcccgcctggctgaccgcccaacgacccccgcccattgacgtcaataatgacgtatgttcccatagtaacgccaatagggactttccattgacgtcaatgggtggagtatttacggtaaactgcccacttggcagtacatcaagtgtatcatatgccaagtacgccccctattgacgtcaatgacggtaaatggcccgcctggcattatgcccagtacatgaccttatgggactttcctacttggcagtacatctacgtattagtcatcgctattaccatggtgatgcggttttggcagtacatcaatgggcgtggatagcggtttgactcacggggatttccaagtctccaccccattgacgtcaatgggagtttgttttggcaccaaaatcaacgggactttccaaaatgtcgtaacaactccgccccattgacgcaaatgggcggtaggcgtgtacggtgggaggtctatataagcagagctggtttagtgaaccgtcagatccgctagcgctaccggactcagatcgccaccatgatcgcccctctgatcctgtacctggacgtgcccttcaccaccttcagagagtctcacgccagagagatgggcaagacataccccgttcctccaccagccacagtgtacggcatgctgctgtctctcgtgggcgagacaaacgtgtacagacactgcggcgtggaactggccattgccatgctgagcagccccaagaagtcccggatcctgcggcagatgcggagattcaagaacgccgacttctctcaccccgagaacgtgatcccttgctaccaagagatcctgagcaacctgaagtgcctgatctgggtccgaagcgacgaggaaaagatccagcctagcctgagagagcggatccagctggcctttgatcaccctgaactcgtcagaagattcggctgcctgttcctgggcgagagcgaccagctgatcaagaccatcaagctggccagagaggactacctggaaggcgttagacagtgggccatccgggacaacagaggcagactgacactgccctattgggtcgaccacgtgggcagcagaaatacccggttcctgagataccggatcgaggaaatggaccggctgagccctcctgacctggcttggacaatggtgcagagccccatcggaggatctggcggaggcggctctggcggcggtggaagcggaggacctaagaagaagagaaaagtctacccctacgacgtgccagactacgcctgactagcataaccccttggggcgcactcctcaggtgcaggctgcctatcagaaggtggtggctggtgtggccaatgccctggctcacaaataccactgagatctttttccctctgccaaaaattatggggacatcatgaagccccttgagcatctgacttctggctaataaaggaaatttattttcattgcaatagtgtgttggaattttttgtgtctctcactcggaaggacatatgggagggcaaatcatttaaaacatcagaatgagtatttggtttagagtttggcaacatatgcccatatgctggctgccatgaacaaaggttggctataaagaggtcatcagtatatgaaacagccccctgctgtccattccttattccatagaaaagccttgacttgaggttagattttttttatattttgttttgtgttatttttttctttaacatccctaaaattttccttacatgttttactagccagatttttcctcctctcctgactactcccagtcatagctgtccctcttctcttatggagatccctcgacctgcagcccaagcttggcgtaatcatggtcatagctgtttcctgtgtgaaattgttatccgctcacaattccacacaacatacgagccggaagcataaagtgtaaagcctggggtgcctaatgagtgagctaactcacattaattgcgttgcgctcactgcccgctttccagtcgggaaacctgtcgtgccagcggatccgcatctcaattagtcagcaaccatagtcccgcccctaactccgcccatcccgcccctaactccgcccagttccgcccattctccgccccatggctgactaattttttttatttatgcagaggccgaggccgcctcggcctctgagctattccagaagtagtgaggaggcttttttggaggcctaggcttttgcaaaaagctaacttgtttattgcagcttataatggttacaaataaagcaatagcatcacaaatttcacaaataaagcatttttttcactgcattctagttgtggtttgtccaaactcatcaatgtatcttatcatgtctggatccgctgcattaatgaatcggccaacgcgcggggagaggcggtttgcgtattgggcgctcttccgcttcctcgctcactgactcgctgcgctcggtcgttcggctgcggcgagcggtatcagctcactcaaaggcggtaatacggttatccacagaatcaggggataacgcaggaaagaacatgtgagcaaaaggccagcaaaaggccaggaaccgtaaaaaggccgcgttgctggcgtttttccataggctccgcccccctgacgagcatcacaaaaatcgacgctcaagtcagaggtggcgaaacccgacaggactataaagataccaggcgtttccccctggaagctccctcgtgcgctctcctgttccgaccctgccgcttaccggatacctgtccgcctttctcccttcgggaagcgtggcgctttctcatagctcacgctgtaggtatctcagttcggtgtaggtcgttcgctccaagctgggctgtgtgcacgaaccccccgttcagcccgaccgctgcgccttatccggtaactatcgtcttgagtccaacccggtaagacacgacttatcgccactggcagcagccactggtaacaggattagcagagcgaggtatgtaggcggtgctacagagttcttgaagtggtggcctaactacggctacactagaagaacagtatttggtatctgcgctctgctgaagccagttaccttcggaaaaagagttggtagctcttgatccggcaaacaaaccaccgctggtagcggtggtttttttgtttgcaagcagcagattacgcgcagaaaaaaaggatctcaagaagatcctttgatcttttctacggggtctgacgctcagtggaacgaaaactcacgttaagggattttggtcatgagattatcaaaaaggatcttcacctagatccttttaaattaaaaatgaagttttaaatcaatctaaagtatatatgagtaaacttggtctgacagttaccaatgcttaatcagtgaggcacctatctcagcgatctgtctatttcgttcatccatagttgcctgactccccgtcgtgtagataactacgatacgggagggcttaccatctggccccagtgctgcaatgataccgcgagacccacgctcaccggctccagatttatcagcaataaaccagccagccggaagggccgagcgcagaagtggtcctgcaactttatccgcctccatccagtctattaattgttgccgggaagctagagtaagtagttcgccagttaatagtttgcgcaacgttgttgccattgctacaggcatcgtggtgtcacgctcgtcgtttggtatggcttcattcagctccggttcccaacgatcaaggcgagttacatgatcccccatgttgtgcaaaaaagcggttagctccttcggtcctccgatcgttgtcagaagtaagttggccgcagtgttatcactcatggttatggcagcactgcataattctcttactgtcatgccatccgtaagatgcttttctgtgactggtgagtactcaaccaagtcattctgagaatagtgtatgcggcgaccgagttgctcttgcccggcgtcaatacgggataataccgcgccacatagcagaactttaaaagtgctcatcattggaaaacgttcttcggggcgaaaactctcaaggatcttaccgctgttgagatccagttcgatgtaacccactcgtgcacccaactgatcttcagcatcttttactttcaccagcgtttctgggtgagcaaaaacaggaaggcaaaatgccgcaaaaaagggaataagggcgacacggaaatgttgaatactcatactcttcctttttcaatattattgaagcatttatcagggttattgtctcatgagcggatacatatttgaatgtatttagaaaaataaacaaataggggttccgcgcacatttccccgaaaagtgccacctgggtcgacattgattattgactagtaatagtaatcaattacggggtcattagttcatagcccatatatggagttccg

SEQ ID NO: 371 - DNA, 4469 bp, Artificial Sequence
  Synthetic
cgttacataacttacggtaaatggcccgcctggctgaccgcccaacgacccccgcccattgacgtcaataatgacgtatgttcccatagtaacgccaatagggactttccattgacgtcaatgggtggagtatttacggtaaactgcccacttggcagtacatcaagtgtatcatatgccaagtacgccccctattgacgtcaatgacggtaaatggcccgcctggcattatgcccagtacatgaccttatgggactttcctacttggcagtacatctacgtattagtcatcgctattaccatggtgatgcggttttggcagtacatcaatgggcgtggatagcggtttgactcacggggatttccaagtctccaccccattgacgtcaatgggagtttgttttggcaccaaaatcaacgggactttccaaaatgtcgtaacaactccgccccattgacgcaaatgggcggtaggcgtgtacggtgggaggtctatataagcagagctggtttagtgaaccgtcagatccgctagcgctaccggactcagatcgccaccatgaccgccatcctgatccagagcgaggaatacgtggacctgaccttcaagctgagaggcgcccctattcctctggacaacggctacctgacatacgccgctctgagcagaatctgccctcctctgcacgaactgaagtccatcggcattcaccctatcgccggcattcccaccagaaacaacctgctggaactgacagcccagagccggctgaagatcagaatctaccaccagcagatccctctgatctacccctacctggccggacaggcctttcacatcggccagaacttctaccagctggacatccccgactacaagcccctgatcagcagcgagagcgtgtacagcagactggtcatcatcaagggcttccaggacagcaccaacttcatcgaggccgtgcagcggcagatggacaatctgggaatccagggcaagatcgagctgctgaccagacaggatggcacccctcagagaaggcagctgaccatcaacaaagagggcaagcagttcaaagtgcgcggcttcggcgtgaagatctccgagctgaaccctgaggacagcctgacactgcaagagcaaggcatcggcggcaagcggaagatgatgtgcggcatctttgtgcccgccaccagatccaaagaggaagaggaaaccggaggatctggcggaggcggctctggcggcggtggaagcggaggacctaagaagaagagaaaagtctacccctacgacgtgccagactacgcctgactagcataaccccttggggcgcactcctcaggtgcaggctgcctatcagaaggtggtggctggtgtggccaatgccctggctcacaaataccactgagatctttttccctctgccaaaaattatggggacatcatgaagccccttgagcatctgacttctggctaataaaggaaatttattttcattgcaatagtgtgttggaattttttgtgtctctcactcggaaggacatatgggagggcaaatcatttaaaacatcagaatgagtatttggtttagagtttggcaacatatgcccatatgctggctgccatgaacaaaggttggctataaagaggtcatcagtatatgaaacagccccctgctgtccattccttattccatagaaaagccttgacttgaggttagattttttttatattttgttttgtgttatttttttctttaacatccctaaaattttccttacatgttttactagccagatttttcctcctctcctgactactcccagtcatagctgtccctcttctcttatggagatccctcgacctgcagcccaagcttggcgtaatcatggtcatagctgtttcctgtgtgaaattgttatccgctcacaattccacacaacatacgagccggaagcataaagtgtaaagcctggggtgcctaatgagtgagctaactcacattaattgcgttgcgctcactgcccgctttccagtcgggaaacctgtcgtgccagcggatccgcatctcaattagtcagcaaccatagtcccgcccctaactccgcccatcccgcccctaactccgcccagttccgcccattctccgccccatggctgactaattttttttatttatgcagaggccgaggccgcctcggcctctgagctattccagaagtagtgaggaggcttttttggaggcctaggcttttgcaaaaagctaacttgtttattgcagcttataatggttacaaataaagcaatagcatcacaaatttcacaaataaagcatttttttcactgcattctagttgtggtttgtccaaactcatcaatgtatcttatcatgtctggatccgctgcattaatgaatcggccaacgcgcggggagaggcggtttgcgtattgggcgctcttccgcttcctcgctcactgactcgctgcgctcggtcgttcggctgcggcgagcggtatcagctcactcaaaggcggtaatacggttatccacagaatcaggggataacgcaggaaagaacatgtgagcaaaaggccagcaaaaggccaggaaccgtaaaaaggccgcgttgctggcgtttttccataggctccgcccccctgacgagcatcacaaaaatcgacgctcaagtcagaggtggcgaaacccgacaggactataaagataccaggcgtttccccctggaagctccctcgtgcgctctcctgttccgaccctgccgcttaccggatacctgtccgcctttctcccttcgggaagcgtggcgctttctcatagctcacgctgtaggtatctcagttcggtgtaggtcgttcgctccaagctgggctgtgtgcacgaaccccccgttcagcccgaccgctgcgccttatccggtaactatcgtcttgagtccaacccggtaagacacgacttatcgccactggcagcagccactggtaacaggattagcagagcgaggtatgtaggcggtgctacagagttcttgaagtggtggcctaactacggctacactagaagaacagtatttggtatctgcgctctgctgaagccagttaccttcggaaaaagagttggtagctcttgatccggcaaacaaaccaccgctggtagcggtggtttttttgtttgcaagcagcagattacgcgcagaaaaaaaggatctcaagaagatcctttgatcttttctacggggtctgacgctcagtggaacgaaaactcacgttaagggattttggtcatgagattatcaaaaaggatcttcacctagatccttttaaattaaaaatgaagttttaaatcaatctaaagtatatatgagtaaacttggtctgacagttaccaatgcttaatcagtgaggcacctatctcagcgatctgtctatttcgttcatccatagttgcctgactccccgtcgtgtagataactacgatacgggagggcttaccatctggccccagtgctgcaatgataccgcgagacccacgctcaccggctccagatttatcagcaataaaccagccagccggaagggccgagcgcagaagtggtcctgcaactttatccgcctccatccagtctattaattgttgccgggaagctagagtaagtagttcgccagttaatagtttgcgcaacgttgttgccattgctacaggcatcgtggtgtcacgctcgtcgtttggtatggcttcattcagctccggttcccaacgatcaaggcgagttacatgatcccccatgttgtgcaaaaaagcggttagctccttcggtcctccgatcgttgtcagaagtaagttggccgcagtgttatcactcatggttatggcagcactgcataattctcttactgtcatgccatccgtaagatgcttttctgtgactggtgagtactcaaccaagtcattctgagaatagtgtatgcggcgaccgagttgctcttgcccggcgtcaatacgggataataccgcgccacatagcagaactttaaaagtgctcatcattggaaaacgttcttcggggcgaaaactctcaaggatcttaccgctgttgagatccagttcgatgtaacccactcgtgcacccaactgatcttcagcatcttttactttcaccagcgtttctgggtgagcaaaaacaggaaggcaaaatgccgcaaaaaagggaataagggcgacacggaaatgttgaatactcatactcttcctttttcaatattattgaagcatttatcagggttattgtctcatgagcggatacatatttgaatgtatttagaaaaataaacaaataggggttccgcgcacatttccccgaaaagtgccacctgggtcgacattgattattgactagtaatagtaatcaattacggggtcattagttcatagcccatatatggagttccg

SEQ ID NO: 372 - DNA, 4778 bp, Artificial Sequence
  Synthetic
cgttacataacttacggtaaatggcccgcctggctgaccgcccaacgacccccgcccattgacgtcaataatgacgtatgttcccatagtaacgccaatagggactttccattgacgtcaatgggtggagtatttacggtaaactgcccacttggcagtacatcaagtgtatcatatgccaagtacgccccctattgacgtcaatgacggtaaatggcccgcctggcattatgcccagtacatgaccttatgggactttcctacttggcagtacatctacgtattagtcatcgctattaccatggtgatgcggttttggcagtacatcaatgggcgtggatagcggtttgactcacggggatttccaagtctccaccccattgacgtcaatgggagtttgttttggcaccaaaatcaacgggactttccaaaatgtcgtaacaactccgccccattgacgcaaatgggcggtaggcgtgtacggtgggaggtctatataagcagagctggtttagtgaaccgtcagatccgctagcgctaccggactcagatcgccaccatgatgacccagaagaagaacgacagcaacatccccaactactacctgtacggcaccgtgctgaccagatacggactggccagcctgaaccacgacatcagaagaggcaacaagaccatcctgcagaaaggctactggaacaacggcaagatccacagcttcgtgggcagcagcgccattagatgggccctgaggttctatctgcagaaacagggctacctggtcaacagagtgtgggacgaagaggaacacatcaacagactgaccagcgaggacttcgaccccgagaagttctacgacgacgacatcttcggcttcgccctgctggaaagcgccgagacagaggaagataccagcaccaccaagcggaagaagaagcagaccaagaccagcacacccaaccagagaatgggcgccctgggcatgaatatggccgtgtctctgaccccttacgatggcgccgtgaagctgggagccaagtctggcagagagaaggacagcaccagcctgcacttcaccgagtaccacgccaccagataccagtactacttcggcatcgacgccacacacctgaaggacttcagccggatcctgcctatgatcgacggcatcatgaacctgcctaaagtcggcggcagcagcaatatcttcaactaccctttctgccccgacagcctggtgttccagtggaccaatcacttcgccagctacatcagctactgcttcgagtactgcgaccccaagagcaaagaggccaagctgagccaagagttcatcgacgaggtggaatgcggccagatcgaccctagcaaactgtggatcggcggcaccatcgtgaaggacctgcagcagctggacaacttcgagagcagccctctgaacaaggcccacatctaccggaaccggaacgagatgatcgaggccctgaaaaccgtgatcaagcgcgacctgggcctcgaggaatccaagggaggatctggcggaggcggctctggcggcggtggaagcggaggacctaagaagaagagaaaagtctacccctacgacgtgccagactacgcctgactagcataaccccttggggcgcactcctcaggtgcaggctgcctatcagaaggtggtggctggtgtggccaatgccctggctcacaaataccactgagatctttttccctctgccaaaaattatggggacatcatgaagccccttgagcatctgacttctggctaataaaggaaatttattttcattgcaatagtgtgttggaattttttgtgtctctcactcggaaggacatatgggagggcaaatcatttaaaacatcagaatgagtatttggtttagagtttggcaacatatgcccatatgctggctgccatgaacaaaggttggctataaagaggtcatcagtatatgaaacagccccctgctgtccattccttattccatagaaaagccttgacttgaggttagattttttttatattttgttttgtgttatttttttctttaacatccctaaaattttccttacatgttttactagccagatttttcctcctctcctgactactcccagtcatagctgtccctcttctcttatggagatccctcgacctgcagcccaagcttggcgtaatcatggtcatagctgtttcctgtgtgaaattgttatccgctcacaattccacacaacatacgagccggaagcataaagtgtaaagcctggggtgcctaatgagtgagctaactcacattaattgcgttgcgctcactgcccgctttccagtcgggaaacctgtcgtgccagcggatccgcatctcaattagtcagcaaccatagtcccgcccctaactccgcccatcccgcccctaactccgcccagttccgcccattctccgccccatggctgactaattttttttatttatgcagaggccgaggccgcctcggcctctgagctattccagaagtagtgaggaggcttttttggaggcctaggcttttgcaaaaagctaacttgtttattgcagcttataatggttacaaataaagcaatagcatcacaaatttcacaaataaagcatttttttcactgcattctagttgtggtttgtccaaactcatcaatgtatcttatcatgtctggatccgctgcattaatgaatcggccaacgcgcggggagaggcggtttgcgtattgggcgctcttccgcttcctcgctcactgactcgctgcgctcggtcgttcggctgcggcgagcggtatcagctcactcaaaggcggtaatacggttatccacagaatcaggggataacgcaggaaagaacatgtgagcaaaaggccagcaaaaggccaggaaccgtaaaaaggccgcgttgctggcgtttttccataggctccgcccccctgacgagcatcacaaaaatcgacgctcaagtcagaggtggcgaaacccgacaggactataaagataccaggcgtttccccctggaagctccctcgtgcgctctcctgttccgaccctgccgcttaccggatacctgtccgcctttctcccttcgggaagcgtggcgctttctcatagctcacgctgtaggtatctcagttcggtgtaggtcgttcgctccaagctgggctgtgtgcacgaaccccccgttcagcccgaccgctgcgccttatccggtaactatcgtcttgagtccaacccggtaagacacgacttatcgccactggcagcagccactggtaacaggattagcagagcgaggtatgtaggcggtgctacagagttcttgaagtggtggcctaactacggctacactagaagaacagtatttggtatctgcgctctgctgaagccagttaccttcggaaaaagagttggtagctcttgatccggcaaacaaaccaccgctggtagcggtggtttttttgtttgcaagcagcagattacgcgcagaaaaaaaggatctcaagaagatcctttgatcttttctacggggtctgacgctcagtggaacgaaaactcacgttaagggattttggtcatgagattatcaaaaaggatcttcacctagatccttttaaattaaaaatgaagttttaaatcaatctaaagtatatatgagtaaacttggtctgacagttaccaatgcttaatcagtgaggcacctatctcagcgatctgtctatttcgttcatccatagttgcctgactccccgtcgtgtagataactacgatacgggagggcttaccatctggccccagtgctgcaatgataccgcgagacccacgctcaccggctccagatttatcagcaataaaccagccagccggaagggccgagcgcagaagtggtcctgcaactttatccgcctccatccagtctattaattgttgccgggaagctagagtaagtagttcgccagttaatagtttgcgcaacgttgttgccattgctacaggcatcgtggtgtcacgctcgtcgtttggtatggcttcattcagctccggttcccaacgatcaaggcgagttacatgatcccccatgttgtgcaaaaaagcggttagctccttcggtcctccgatcgttgtcagaagtaagttggccgcagtgttatcactcatggttatggcagcactgcataattctcttactgtcatgccatccgtaagatgcttttctgtgactggtgagtactcaaccaagtcattctgagaatagtgtatgcggcgaccgagttgctcttgcccggcgtcaatacgggataataccgcgccacatagcagaactttaaaagtgctcatcattggaaaacgttcttcggggcgaaaactctcaaggatcttaccgctgttgagatccagttcgatgtaacccactcgtgcacccaactgatcttcagcatcttttactttcaccagcgtttctgggtgagcaaaaacaggaaggcaaaatgccgcaaaaaagggaataagggcgacacggaaatgttgaatactcatactcttcctttttcaatattattgaagcatttatcagggttattgtctcatgagcggatacatatttgaatgtatttagaaaaataaacaaataggggttccgcgcacatttccccgaaaagtgccacctgggtcgacattgattattgactagtaatagtaatcaattacggggtcattagttcatagcccatatatggagttccg

SEQ ID NO: 373 - DNA, 5387 bp, Artificial Sequence
  Synthetic
cgttacataacttacggtaaatggcccgcctggctgaccgcccaacgacccccgcccattgacgtcaataatgacgtatgttcccatagtaacgccaatagggactttccattgacgtcaatgggtggagtatttacggtaaactgcccacttggcagtacatcaagtgtatcatatgccaagtacgccccctattgacgtcaatgacggtaaatggcccgcctggcattatgcccagtacatgaccttatgggactttcctacttggcagtacatctacgtattagtcatcgctattaccatggtgatgcggttttggcagtacatcaatgggcgtggatagcggtttgactcacggggatttccaagtctccaccccattgacgtcaatgggagtttgttttggcaccaaaatcaacgggactttccaaaatgtcgtaacaactccgccccattgacgcaaatgggcggtaggcgtgtacggtgggaggtctatataagcagagctggtttagtgaaccgtcagatccgctagcgctaccggactcagatcgccaccatgatcgtgtccacacagcccaagatcagcctgtctctgcacgccgccgataccaccatcatgcacagagtgggcatgaccggcctgtacatgaccctgaagcggctggaaaagcagtaccctctgagcagacagagaggcggccacatcagctggtttctgaccgccgacaccatcgagctgttttgggagggcagcgactttatcgccctgagctggctgatcaacgagagctttcagctggacgacaccggcctgatccacctcgttggcctggacaacgaccggatcgacctgagacagaagatccacatccacgagggaatctgcggcgtgttcctgcggctgaacaagttttaccaggccggcgagatcatcaacaccgagctgagattcgaagagaagcaggtcgagtaccagtacaagagcctgacttggtacgcccaccagaccttcgccgagaagctgtgcgaagccgatacacagcagctgcggcacgactacatccagatcaccagctggctgtacctcggcggaattgtgcggcatgccagaacacagaacaccaccaagctggaagagaaacccgagtacgccctggctctgctgtttgtgcctgtcgtgtgccactactgcctgctgcacatccctagcgaggacctgaaagagcggaagccccacagatacctggtggtcatccccgagatcaaggacttcgaggatgccagccagagaagatggcggctgcagcagctggaaacaaagcagttccacgtgtccagcctgggcgaagccggcctgctgtactacagcctggatgacattcagcccgaggtggcctactaccaggcctgtcaagtgtggctgtacgaaaagaccaacaaggccagccggcagcggaccctgatgagcatcgaggaaatcaagatcgacaagaacatcctcatcacctaccagcaggtccagaagtactttaagaccaactaccagatcattaagtacaagcagatcttcatcaaagtgaaccccattcggagcctgatcgccgacaatctggtcaagggaatccactggtggtccaatttctgggagaagctggtcatcgaggacagcaaagagtacctgttcaaccagctgttcagcaaccgcgagggcttcatcatcatggccgagaacagcgaagaggacaagcagtatctgatctttatcaaggtgttccagcaggccatgaagggcaacttcgccaagatctacgccaagaccgaggaaggcaaggaccctcctatcaagaaaaaggtggaacggctgcgggccgagctgaactactgttacgatgagctgagcttcaaagaatacctgagcgacttcctcgtcagaggcggactgaacaaatacttcaacgagcaccaagaggaaatcgccctgctgatcaagaagtccccttggcaagagatcagaatctggtccctgctggccattgccagctacaagcccaaggacaagctgaccaaccgggacgatagcagcctgagcaacaaccagaaactggaagaagtgaacgacgacagcgaggaagagggaggatctggcggaggcggctctggcggcggtggaagcggaggacctaagaagaagagaaaagtctacccctacgacgtgccagactacgcctgactagcataaccccttggggcgcactcctcaggtgcaggctgcctatcagaaggtggtggctggtgtggccaatgccctggctcacaaataccactgagatctttttccctctgccaaaaattatggggacatcatgaagccccttgagcatctgacttctggctaataaaggaaatttattttcattgcaatagtgtgttggaattttttgtgtctctcactcggaaggacatatgggagggcaaatcatttaaaacatcagaatgagtatttggtttagagtttggcaacatatgcccatatgctggctgccatgaacaaaggttggctataaagaggtcatcagtatatgaaacagccccctgctgtccattccttattccatagaaaagccttgacttgaggttagattttttttatattttgttttgtgttatttttttctttaacatccctaaaattttccttacatgttttactagccagatttttcctcctctcctgactactcccagtcatagctgtccctcttctcttatggagatccctcgacctgcagcccaagcttggcgtaatcatggtcatagctgtttcctgtgtgaaattgttatccgctcacaattccacacaacatacgagccggaagcataaagtgtaaagcctggggtgcctaatgagtgagctaactcacattaattgcgttgcgctcactgcccgctttccagtcgggaaacctgtcgtgccagcggatccgcatctcaattagtcagcaaccatagtcccgcccctaactccgcccatcccgcccctaactccgcccagttccgcccattctccgccccatggctgactaattttttttatttatgcagaggccgaggccgcctcggcctctgagctattccagaagtagtgaggaggcttttttggaggcctaggcttttgcaaaaagctaacttgtttattgcagcttataatggttacaaataaagcaatagcatcacaaatttcacaaataaagcatttttttcactgcattctagttgtggtttgtccaaactcatcaatgtatcttatcatgtctggatccgctgcattaatgaatcggccaacgcgcggggagaggcggtttgcgtattgggcgctcttccgcttcctcgctcactgactcgctgcgctcggtcgttcggctgcggcgagcggtatcagctcactcaaaggcggtaatacggttatccacagaatcaggggataacgcaggaaagaacatgtgagcaaaaggccagcaaaaggccaggaaccgtaaaaaggccgcgttgctggcgtttttccataggctccgcccccctgacgagcatcacaaaaatcgacgctcaagtcagaggtggcgaaacccgacaggactataaagataccaggcgtttccccctggaagctccctcgtgcgctctcctgttccgaccctgccgcttaccggatacctgtccgcctttctcccttcgggaagcgtggcgctttctcatagctcacgctgtaggtatctcagttcggtgtaggtcgttcgctccaagctgggctgtgtgcacgaaccccccgttcagcccgaccgctgcgccttatccggtaactatcgtcttgagtccaacccggtaagacacgacttatcgccactggcagcagccactggtaacaggattagcagagcgaggtatgtaggcggtgctacagagttcttgaagtggtggcctaactacggctacactagaagaacagtatttggtatctgcgctctgctgaagccagttaccttcggaaaaagagttggtagctcttgatccggcaaacaaaccaccgctggtagcggtggtttttttgtttgcaagcagcagattacgcgcagaaaaaaaggatctcaagaagatcctttgatcttttctacggggtctgacgctcagtggaacgaaaactcacgttaagggattttggtcatgagattatcaaaaaggatcttcacctagatccttttaaattaaaaatgaagttttaaatcaatctaaagtatatatgagtaaacttggtctgacagttaccaatgcttaatcagtgaggcacctatctcagcgatctgtctatttcgttcatccatagttgcctgactccccgtcgtgtagataactacgatacgggagggcttaccatctggccccagtgctgcaatgataccgcgagacccacgctcaccggctccagatttatcagcaataaaccagccagccggaagggccgagcgcagaagtggtcctgcaactttatccgcctccatccagtctattaattgttgccgggaagctagagtaagtagttcgccagttaatagtttgcgcaacgttgttgccattgctacaggcatcgtggtgtcacgctcgtcgtttggtatggcttcattcagctccggttcccaacgatcaaggcgagttacatgatcccccatgttgtgcaaaaaagcggttagctccttcggtcctccgatcgttgtcagaagtaagttggccgcagtgttatcactcatggttatggcagcactgcataattctcttactgtcatgccatccgtaagatgcttttctgtgactggtgagtactcaaccaagtcattctgagaatagtgtatgcggcgaccgagttgctcttgcccggcgtcaatacgggataataccgcgccacatagcagaactttaaaagtgctcatcattggaaaacgttcttcggggcgaaaactctcaaggatcttaccgctgttgagatccagttcgatgtaacccactcgtgcacccaactgatcttcagcatcttttactttcaccagcgtttctgggtgagcaaaaacaggaaggcaaaatgccgcaaaaaagggaataagggcgacacggaaatgttgaatactcatactcttcctttttcaatattattgaagcatttatcagggttattgtctcatgagcggatacatatttgaatgtatttagaaaaataaacaaataggggttccgcgcacatttccccgaaaagtgccacctgggtcgacattgattattgactagtaatagtaatcaattacggggtcattagttcatagcccatatatggagttccg

SEQ ID NO: 374 - DNA, 4796 bp, Artificial Sequence
  Synthetic
cgttacataacttacggtaaatggcccgcctggctgaccgcccaacgacccccgcccattgacgtcaataatgacgtatgttcccatagtaacgccaatagggactttccattgacgtcaatgggtggagtatttacggtaaactgcccacttggcagtacatcaagtgtatcatatgccaagtacgccccctattgacgtcaatgacggtaaatggcccgcctggcattatgcccagtacatgaccttatgggactttcctacttggcagtacatctacgtattagtcatcgctattaccatggtgatgcggttttggcagtacatcaatgggcgtggatagcggtttgactcacggggatttccaagtctccaccccattgacgtcaatgggagtttgttttggcaccaaaatcaacgggactttccaaaatgtcgtaacaactccgccccattgacgcaaatgggcggtaggcgtgtacggtgggaggtctatataagcagagctggtttagtgaaccgtcagatccgctagcgctaccggactcagatcgccaccatgaccatctacagcgagcactggtccctgaatcctctggaaatccctcagcggagccggctgtttagcctggaacctgtggctgtgggcacaccttatgccgagagcctgagcagctacctgcacagactggcccaggctcactgtctgacaagcgagaagctggtcatgggcgagatcgcccctctgatcctgaaggacgaggacaagagcgagctgctgagcaagaacctgagccatctgctgggcaacagcgacgccaagcctgccatcaatggcatgagagagatgaccgagaagctcgtgaccgtgctggaagaactgaccatgcggcaggacctgcggtttctgacactgctgtcttggaagggcatgatctacgacaagggcctgttccgcaactacagagcctggtgtccttgctgctgcgaggaatggatgcagaagaacaagacaatctacgagcccctgagctggtccttcaaggacgtggaattctgcctgatccacaagcagcggctgatcgaggaatgcagccattgtggcgctagactgcccgtgatggccagactttctcctgccggcttctgcagcagatgctatggctggctgggccaagagatcaagggcgaagaggaaatcgagaagtaccgcgtgaacatccagggcatctccgagctgattgccctgacacctcagctgggctacaagcccattcctatcgagctgacccggaaactgcagctgatcctgctggtgttcgagcaggccatcggcaaggatgtgaagctgctgggagatctcggcggcatcatggaaagcctgagaatcgccagcaccaccaaccagagccagccttaccacctggtcaagctgatcatccccgtgtgcgagaaggccaagatcagcgtgttccagctgttcggcagcgacttcaaagagctgggcaagatcctgtttggcaacttctccctggaactgaaactgggaggatctggcggaggcggctctggcggcggtggaagcggaggacctaagaagaagagaaaagtctacccctacgacgtgccagactacgcctgactagcataaccccttggggcgcactcctcaggtgcaggctgcctatcagaaggtggtggctggtgtggccaatgccctggctcacaaataccactgagatctttttccctctgccaaaaattatggggacatcatgaagccccttgagcatctgacttctggctaataaaggaaatttattttcattgcaatagtgtgttggaattttttgtgtctctcactcggaaggacatatgggagggcaaatcatttaaaacatcagaatgagtatttggtttagagtttggcaacatatgcccatatgctggctgccatgaacaaaggttggctataaagaggtcatcagtatatgaaacagccccctgctgtccattccttattccatagaaaagccttgacttgaggttagattttttttatattttgttttgtgttatttttttctttaacatccctaaaattttccttacatgttttactagccagatttttcctcctctcctgactactcccagtcatagctgtccctcttctcttatggagatccctcgacctgcagcccaagcttggcgtaatcatggtcatagctgtttcctgtgtgaaattgttatccgctcacaattccacacaacatacgagccggaagcataaagtgtaaagcctggggtgcctaatgagtgagctaactcacattaattgcgttgcgctcactgcccgctttccagtcgggaaacctgtcgtgccagcggatccgcatctcaattagtcagcaaccatagtcccgcccctaactccgcccatcccgcccctaactccgcccagttccgcccattctccgccccatggctgactaattttttttatttatgcagaggccgaggccgcctcggcctctgagctattccagaagtagtgaggaggcttttttggaggcctaggcttttgcaaaaagctaacttgtttattgcagcttataatggttacaaataaagcaatagcatcacaaatttcacaaataaagcatttttttcactgcattctagttgtggtttgtccaaactcatcaatgtatcttatcatgtctggatccgctgcattaatgaatcggccaacgcgcggggagaggcggtttgcgtattgggcgctcttccgcttcctcgctcactgactcgctgcgctcggtcgttcggctgcggcgagcggtatcagctcactcaaaggcggtaatacggttatccacagaatcaggggataacgcaggaaagaacatgtgagcaaaaggccagcaaaaggccaggaaccgtaaaaaggccgcgttgctggcgtttttccataggctccgcccccctgacgagcatcacaaaaatcgacgctcaagtcagaggtggcgaaacccgacaggactataaagataccaggcgtttccccctggaagctccctcgtgcgctctcctgttccgaccctgccgcttaccggatacctgtccgcctttctcccttcgggaagcgtggcgctttctcatagctcacgctgtaggtatctcagttcggtgtaggtcgttcgctccaagctgggctgtgtgcacgaaccccccgttcagcccgaccgctgcgccttatccggtaactatcgtcttgagtccaacccggtaagacacgacttatcgccactggcagcagccactggtaacaggattagcagagcgaggtatgtaggcggtgctacagagttcttgaagtggtggcctaactacggctacactagaagaacagtatttggtatctgcgctctgctgaagccagttaccttcggaaaaagagttggtagctcttgatccggcaaacaaaccaccgctggtagcggtggtttttttgtttgcaagcagcagattacgcgcagaaaaaaaggatctcaagaagatcctttgatcttttctacggggtctgacgctcagtggaacgaaaactcacgttaagggattttggtcatgagattatcaaaaaggatcttcacctagatccttttaaattaaaaatgaagttttaaatcaatctaaagtatatatgagtaaacttggtctgacagttaccaatgcttaatcagtgaggcacctatctcagcgatctgtctatttcgttcatccatagttgcctgactccccgtcgtgtagataactacgatacgggagggcttaccatctggccccagtgctgcaatgataccgcgagacccacgctcaccggctccagatttatcagcaataaaccagccagccggaagggccgagcgcagaagtggtcctgcaactttatccgcctccatccagtctattaattgttgccgggaagctagagtaagtagttcgccagttaatagtttgcgcaacgttgttgccattgctacaggcatcgtggtgtcacgctcgtcgtttggtatggcttcattcagctccggttcccaacgatcaaggcgagttacatgatcccccatgttgtgcaaaaaagcggttagctccttcggtcctccgatcgttgtcagaagtaagttggccgcagtgttatcactcatggttatggcagcactgcataattctcttactgtcatgccatccgtaagatgcttttctgtgactggtgagtactcaaccaagtcattctgagaatagtgtatgcggcgaccgagttgctcttgcccggcgtcaatacgggataataccgcgccacatagcagaactttaaaagtgctcatcattggaaaacgttcttcggggcgaaaactctcaaggatcttaccgctgttgagatccagttcgatgtaacccactcgtgcacccaactgatcttcagcatcttttactttcaccagcgtttctgggtgagcaaaaacaggaaggcaaaatgccgcaaaaaagggaataagggcgacacggaaatgttgaatactcatactcttcctttttcaatattattgaagcatttatcagggttattgtctcatgagcggatacatatttgaatgtatttagaaaaataaacaaataggggttccgcgcacatttccccgaaaagtgccacctgggtcgacattgattattgactagtaatagtaatcaattacggggtcattagttcatagcccatatatggagttccg

SEQ ID NO: 375 - DNA, 6503 bp, Artificial Sequence
  Synthetic
cgttacataacttacggtaaatggcccgcctggctgaccgcccaacgacccccgcccattgacgtcaataatgacgtatgttcccatagtaacgccaatagggactttccattgacgtcaatgggtggagtatttacggtaaactgcccacttggcagtacatcaagtgtatcatatgccaagtacgccccctattgacgtcaatgacggtaaatggcccgcctggcattatgcccagtacatgaccttatgggactttcctacttggcagtacatctacgtattagtcatcgctattaccatggtgatgcggttttggcagtacatcaatgggcgtggatagcggtttgactcacggggatttccaagtctccaccccattgacgtcaatgggagtttgttttggcaccaaaatcaacgggactttccaaaatgtcgtaacaactccgccccattgacgcaaatgggcggtaggcgtgtacggtgggaggtctatataagcagagctggtttagtgaaccgtcagatccgctagcgctaccggactcagatcgccaccatgaaggaacagttcgagcagtgggtcgcccggctgcagatttctgaagccggccagaaaatcatcgagaaagtgcggagcagcgagcccagcagaagagttggcggaggcagcaagaatgtgtccggcagatacccctccagaaagatgggcgtgaccatccagttcgagagccacagagtggaactgcccatcatctaccagctggaacacgacaaggacgtgctggaattctacgaccagcctcctcagatcaagctggactaccaggccagcaatggcagacgactgggagtgctgcacacccctgatctgttcgtgatcaggaccaatagcgccggctgggaagagtgcaagaccgagcaggatctgaagaagctggccgagaagaaccccaaccggtacttctacagcgaagagaacaaccagtggcacagcctgcctggcgaggtgtacgccaatcagtttggcctgtaccaccggatccacagcgaccgcgaaatcaactgggtgctgcagcggaacctgcagttcctggaagattactaccgcagcgagagcctggtggtggaagaggccattgctcagtctctgctggccatcgtgtctagccagcctggaattacactggccgagctgctgaacagaagcaccggcgccaagagcgacgacatctacaccctgatcatccaagagcagatctacatcgacctgaacgccacacctctggctgagcctgagagatgcctgatcttcagggatgagcagaccgccagcgcctacagactgatggttgagcagcctagcgtgtccctgcctgccatctctcccgtggtcaatattgtgacaggcgccaccgtgtcctgggatggcaagggcctgaatatcatccacgtgggcgagacagaagtgatcctgggcgccgagaacaatcagctcatcgaactgaagaaggccatcttcgagaacctcgtgcggcagggcaagatcacctctctgcagaccccagagaaaaccgccatcagcacagagagctggcagcggtttcatcaggcctctccagaggatcaggccgaggctctggaacggtacaagaccatcgagccctacctgaacggacaccctcctgagaacgagacaatccccgccagaaccatcagacactggaaggccaagtacctgatcgccatccagaagtacggctgcggctatatcggcctgctgtcccacagaagcgtgaagggcaacagacagagaaagctgcccgaggacaccctggccatcatggaaaagttcattctcgaggactacgagacactgaagcagaaacggatgtgggaagtgcacgccgctctcgtgcgagcttgtgaagaagcaggcgttatcgcccctagctacaaggccttcaccaaagaggtgcagcggagaaccggctacgagcagaccaagaagagacaaggcagaagggccgcctaccagcacgagtccttttactgggaactcgccatcaccacacctcggcacggcgatagacctttcgagatcggccacatcgaccacaccgagctggatgtggaactcgtgtgtagcgacaccggcagaaacctgggtagaccttgggccacctttctggtggacgcctactctagaaggctgctggccgtgtacctgaccttcgacagcccaagctaccggtcctgtctcatggtgctgcggatctgcgtgaagaggcatggcagactgcctcagatcgtggtggtcgataatggcgccgagtttcacagcgtgtacttcgaaaccctgctggctaccttcgagtgcaccaagaagcagcggcctccagccaaggccagatttggcagcgtgtgcgagagactgttcggcaccagcaacacccagttcgtgcacaacctgctgggcaatacccagatcacccggaacgtgcggcaagtgaccaagagcgtgaaccccaagaacctggctgtgtggacactgggactgctgtacgagtacctgtgtgcctgggcctacgaagtgtacgataccgacgaacaccccgctctgtttcagagccctagggatgcctttgccgccggaatggctatcggcggatctcgggtgcacagaatgatcccttacgacgagaacttccagatcctgacactgcccaccacctccgagggcaaagccaaggtgcaagtcggcagaggcatcaagatcaactacatctactactggtccaacagcttcagggacccacagatcgagaacaccagcgtgcagatcagatacgaccccttcaacatcggaatcgcctacgccttcgtcagaggccagtgggtgcagtgcatcagccagtactacgccgaactccagggcagaagcgagaaagagctgaaactggccagcatcgagctgcggaagcactacagcaatcacacccagcagagcaaggtgtccgccaaaaacctggccgagttcctggcaagcgtggaagctcaagaagccctgctggaacagagaagctacgacgccgaagtgaaagaggtgttccgggtcatcgaaggcggcaaggccacaaccagcagaaatgaggaacccaagctgatccaagtgaccttcgccaacaccgacttccaggccgatgaggacgaagccatcgtgcctgaaacactggtggtgtacgaggaattcggaggatctggcggaggcggctctggcggcggtggaagcggaggacctaagaagaagagaaaagtctacccctacgacgtgccagactacgcctgactagcataaccccttggggcgcactcctcaggtgcaggctgcctatcagaaggtggtggctggtgtggccaatgccctggctcacaaataccactgagatctttttccctctgccaaaaattatggggacatcatgaagccccttgagcatctgacttctggctaataaaggaaatttattttcattgcaatagtgtgttggaattttttgtgtctctcactcggaaggacatatgggagggcaaatcatttaaaacatcagaatgagtatttggtttagagtttggcaacatatgcccatatgctggctgccatgaacaaaggttggctataaagaggtcatcagtatatgaaacagccccctgctgtccattccttattccatagaaaagccttgacttgaggttagattttttttatattttgttttgtgttatttttttctttaacatccctaaaattttccttacatgttttactagccagatttttcctcctctcctgactactcccagtcatagctgtccctcttctcttatggagatccctcgacctgcagcccaagcttggcgtaatcatggtcatagctgtttcctgtgtgaaattgttatccgctcacaattccacacaacatacgagccggaagcataaagtgtaaagcctggggtgcctaatgagtgagctaactcacattaattgcgttgcgctcactgcccgctttccagtcgggaaacctgtcgtgccagcggatccgcatctcaattagtcagcaaccatagtcccgcccctaactccgcccatcccgcccctaactccgcccagttccgcccattctccgccccatggctgactaattttttttatttatgcagaggccgaggccgcctcggcctctgagctattccagaagtagtgaggaggcttttttggaggcctaggcttttgcaaaaagctaacttgtttattgcagcttataatggttacaaataaagcaatagcatcacaaatttcacaaataaagcatttttttcactgcattctagttgtggtttgtccaaactcatcaatgtatcttatcatgtctggatccgctgcattaatgaatcggccaacgcgcggggagaggcggtttgcgtattgggcgctcttccgcttcctcgctcactgactcgctgcgctcggtcgttcggctgcggcgagcggtatcagctcactcaaaggcggtaatacggttatccacagaatcaggggataacgcaggaaagaacatgtgagcaaaaggccagcaaaaggccaggaaccgtaaaaaggccgcgttgctggcgtttttccataggctccgcccccctgacgagcatcacaaaaatcgacgctcaagtcagaggtggcgaaacccgacaggactataaagataccaggcgtttccccctggaagctccctcgtgcgctctcctgttccgaccctgccgcttaccggatacctgtccgcctttctcccttcgggaagcgtggcgctttctcatagctcacgctgtaggtatctcagttcggtgtaggtcgttcgctccaagctgggctgtgtgcacgaaccccccgttcagcccgaccgctgcgccttatccggtaactatcgtcttgagtccaacccggtaagacacgacttatcgccactggcagcagccactggtaacaggattagcagagcgaggtatgtaggcggtgctacagagttcttgaagtggtggcctaactacggctacactagaagaacagtatttggtatctgcgctctgctgaagccagttaccttcggaaaaagagttggtagctcttgatccggcaaacaaaccaccgctggtagcggtggtttttttgtttgcaagcagcagattacgcgcagaaaaaaaggatctcaagaagatcctttgatcttttctacggggtctgacgctcagtggaacgaaaactcacgttaagggattttggtcatgagattatcaaaaaggatcttcacctagatccttttaaattaaaaatgaagttttaaatcaatctaaagtatatatgagtaaacttggtctgacagttaccaatgcttaatcagtgaggcacctatctcagcgatctgtctatttcgttcatccatagttgcctgactccccgtcgtgtagataactacgatacgggagggcttaccatctggccccagtgctgcaatgataccgcgagacccacgctcaccggctccagatttatcagcaataaaccagccagccggaagggccgagcgcagaagtggtcctgcaactttatccgcctccatccagtctattaattgttgccgggaagctagagtaagtagttcgccagttaatagtttgcgcaacgttgttgccattgctacaggcatcgtggtgtcacgctcgtcgtttggtatggcttcattcagctccggttcccaacgatcaaggcgagttacatgatcccccatgttgtgcaaaaaagcggttagctccttcggtcctccgatcgttgtcagaagtaagttggccgcagtgttatcactcatggttatggcagcactgcataattctcttactgtcatgccatccgtaagatgcttttctgtgactggtgagtactcaaccaagtcattctgagaatagtgtatgcggcgaccgagttgctcttgcccggcgtcaatacgggataataccgcgccacatagcagaactttaaaagtgctcatcattggaaaacgttcttcggggcgaaaactctcaaggatcttaccgctgttgagatccagttcgatgtaacccactcgtgcacccaactgatcttcagcatcttttactttcaccagcgtttctgggtgagcaaaaacaggaaggcaaaatgccgcaaaaaagggaataagggcgacacggaaatgttgaatactcatactcttcctttttcaatattattgaagcatttatcagggttattgtctcatgagcggatacatatttgaatgtatttagaaaaataaacaaataggggttccgcgcacatttccccgaaaagtgccacctgggtcgacattgattattgactagtaatagtaatcaattacggggtcattagttcatagcccatatatggagttccg

SEQ ID NO: 376 - DNA, 4958 bp, Artificial Sequence
  Synthetic
cgttacataacttacggtaaatggcccgcctggctgaccgcccaacgacccccgcccattgacgtcaataatgacgtatgttcccatagtaacgccaatagggactttccattgacgtcaatgggtggagtatttacggtaaactgcccacttggcagtacatcaagtgtatcatatgccaagtacgccccctattgacgtcaatgacggtaaatggcccgcctggcattatgcccagtacatgaccttatgggactttcctacttggcagtacatctacgtattagtcatcgctattaccatggtgatgcggttttggcagtacatcaatgggcgtggatagcggtttgactcacggggatttccaagtctccaccccattgacgtcaatgggagtttgttttggcaccaaaatcaacgggactttccaaaatgtcgtaacaactccgccccattgacgcaaatgggcggtaggcgtgtacggtgggaggtctatataagcagagctggtttagtgaaccgtcagatccgctagcgctaccggactcagatcgccaccatgaccaagagcaccggctttccactggaactgctgaccagacctgccaccgagagactggcctacttcgagaactacaccgtggctcaccccagactgaaagaggtgtacgagatcctgatgcggacaatcgccgaacctgccggcgctagcttcatctttgtgtatggcgctagcggcgtgggcaagaccacactgagactgagagtggaacagaagctgaccgagctggccctgcctaagctggaaagcgatagagccagagtgcccgtcgtgggcattgaggctattgcccctgagagccggtacttcaactggaaagagtactacacacgggccctgatcaccctggaagaacccctgatcgaccacaagttcgactatggcgtgcggggcatcagcagagacaacttcggcaagatcaacgtggaaagcaaggtggtggcccctgctctgagaagggccctcgaaaatgccctgatccacagacaccccgacgtgttctttgtggacgaggcccagcactttggcaaggtggcctctggctacaagctgcaggatcagctggactgcctgaagtccctggccaacatgacaggcatcctgcactgtctgctgggcacctacgagctgctgaccttcagaaatctgagcggccagctgtctcggcggagcgtggacatccacttcagaagatactgcgccgactctcccgaggacgtgcaggcctttaaaagcgtgctgctgacattccagcagcatctgcctctggccgagacacccaatctggtggatcactgggagtacttctacgagagaaccctgggctgcatcggcaccctgaaggactggctgaagagagtgctgagcgacgccctggatagagaggccacaaccatcacactgaaggacctgcagaaaagggccctgagcgtggcccagtgccagaagatgttcaaagagatccaagagggcgaacgccagctgagcgaaacagaggccgatgtgcagaacctgagatctgcccttggcctgggagccaagcctatcgttctgcctgaggaaacccctaagaccaccagacctccaggcaaagtgggcaaaagaaagcccaagagggaccccatcggagtgcagcaggatgtgtctggaggatctggcggaggcggctctggcggcggtggaagcggaggacctaagaagaagagaaaagtctacccctacgacgtgccagactacgcctgactagcataaccccttggggcgcactcctcaggtgcaggctgcctatcagaaggtggtggctggtgtggccaatgccctggctcacaaataccactgagatctttttccctctgccaaaaattatggggacatcatgaagccccttgagcatctgacttctggctaataaaggaaatttattttcattgcaatagtgtgttggaattttttgtgtctctcactcggaaggacatatgggagggcaaatcatttaaaacatcagaatgagtatttggtttagagtttggcaacatatgcccatatgctggctgccatgaacaaaggttggctataaagaggtcatcagtatatgaaacagccccctgctgtccattccttattccatagaaaagccttgacttgaggttagattttttttatattttgttttgtgttatttttttctttaacatccctaaaattttccttacatgttttactagccagatttttcctcctctcctgactactcccagtcatagctgtccctcttctcttatggagatccctcgacctgcagcccaagcttggcgtaatcatggtcatagctgtttcctgtgtgaaattgttatccgctcacaattccacacaacatacgagccggaagcataaagtgtaaagcctggggtgcctaatgagtgagctaactcacattaattgcgttgcgctcactgcccgctttccagtcgggaaacctgtcgtgccagcggatccgcatctcaattagtcagcaaccatagtcccgcccctaactccgcccatcccgcccctaactccgcccagttccgcccattctccgccccatggctgactaattttttttatttatgcagaggccgaggccgcctcggcctctgagctattccagaagtagtgaggaggcttttttggaggcctaggcttttgcaaaaagctaacttgtttattgcagcttataatggttacaaataaagcaatagcatcacaaatttcacaaataaagcatttttttcactgcattctagttgtggtttgtccaaactcatcaatgtatcttatcatgtctggatccgctgcattaatgaatcggccaacgcgcggggagaggcggtttgcgtattgggcgctcttccgcttcctcgctcactgactcgctgcgctcggtcgttcggctgcggcgagcggtatcagctcactcaaaggcggtaatacggttatccacagaatcaggggataacgcaggaaagaacatgtgagcaaaaggccagcaaaaggccaggaaccgtaaaaaggccgcgttgctggcgtttttccataggctccgcccccctgacgagcatcacaaaaatcgacgctcaagtcagaggtggcgaaacccgacaggactataaagataccaggcgtttccccctggaagctccctcgtgcgctctcctgttccgaccctgccgcttaccggatacctgtccgcctttctcccttcgggaagcgtggcgctttctcatagctcacgctgtaggtatctcagttcggtgtaggtcgttcgctccaagctgggctgtgtgcacgaaccccccgttcagcccgaccgctgcgccttatccggtaactatcgtcttgagtccaacccggtaagacacgacttatcgccactggcagcagccactggtaacaggattagcagagcgaggtatgtaggcggtgctacagagttcttgaagtggtggcctaactacggctacactagaagaacagtatttggtatctgcgctctgctgaagccagttaccttcggaaaaagagttggtagctcttgatccggcaaacaaaccaccgctggtagcggtggtttttttgtttgcaagcagcagattacgcgcagaaaaaaaggatctcaagaagatcctttgatcttttctacggggtctgacgctcagtggaacgaaaactcacgttaagggattttggtcatgagattatcaaaaaggatcttcacctagatccttttaaattaaaaatgaagttttaaatcaatctaaagtatatatgagtaaacttggtctgacagttaccaatgcttaatcagtgaggcacctatctcagcgatctgtctatttcgttcatccatagttgcctgactccccgtcgtgtagataactacgatacgggagggcttaccatctggccccagtgctgcaatgataccgcgagacccacgctcaccggctccagatttatcagcaataaaccagccagccggaagggccgagcgcagaagtggtcctgcaactttatccgcctccatccagtctattaattgttgccgggaagctagagtaagtagttcgccagttaatagtttgcgcaacgttgttgccattgctacaggcatcgtggtgtcacgctcgtcgtttggtatggcttcattcagctccggttcccaacgatcaaggcgagttacatgatcccccatgttgtgcaaaaaagcggttagctccttcggtcctccgatcgttgtcagaagtaagttggccgcagtgttatcactcatggttatggcagcactgcataattctcttactgtcatgccatccgtaagatgcttttctgtgactggtgagtactcaaccaagtcattctgagaatagtgtatgcggcgaccgagttgctcttgcccggcgtcaatacgggataataccgcgccacatagcagaactttaaaagtgctcatcattggaaaacgttcttcggggcgaaaactctcaaggatcttaccgctgttgagatccagttcgatgtaacccactcgtgcacccaactgatcttcagcatcttttactttcaccagcgtttctgggtgagcaaaaacaggaaggcaaaatgccgcaaaaaagggaataagggcgacacggaaatgttgaatactcatactcttcctttttcaatattattgaagcatttatcagggttattgtctcatgagcggatacatatttgaatgtatttagaaaaataaacaaataggggttccgcgcacatttccccgaaaagtgccacctgggtcgacattgattattgactagtaatagtaatcaattacggggtcattagttcatagcccatatatggagttccg

SEQ ID NO: 377 - DNA, 4558 bp, Artificial Sequence
  Synthetic
tcgcgcgtttcggtgatgacggtgaaaacctctgacacatgcagctcccggagacggtcacagcttgtctgtaagcggatgccgggagcagacaagcccgtcagggcgcgtcagcgggtgttggcgggtgtcggggctggcttaactatgcggcatcagagcagattgtactgagagtgcaccatatgcggtgtgaaataccgcacagatgcgtaaggagaaaataccgcatcaggcgccattcgccattcaggctgcgcaactgttgggaagggcgatcggtgcgggcctcttcgctattacgccagctggcgaaagggggatgtgctgcaaggcgattaagttgggtaacgccagggttttcccagtcacgacgttgtaaaacgacggccagtgaattgacgcgtattgggatcaatggctggtactataattcccctggttgctgaagcggtaaaagtgcgtcaactagttttgtgactttacccataactttgccgttactggaaccataactttgccgtcaacaacactacaaccctcattcttgcgtcagctaattttggatgaaattgacagtttggaaccataactttgccgctagtccaaattggaaggataagcttgccgtgagtccaatcaagcatagaaagcaggaaaacgccgaatttttttagaatggagcagaagccggggatcctaggtcttgaaaggagtgggaattggctccggtgcccgtcagtgggcagagcgcacatcgcccacagtccccgagaagttggggggaggggtcggcaattgatccggtgcctagagaaggtggcgcggggtaaactgggaaagtgatgtcgtgtactggctccgcctttttcccgagggtgggggagaaccgtatataagtgcagtagtcgccgtgaacgttctttttcgcaacgggtttgccgccagaacacaggaccggttctagagcgctgccaccatgaccgagtacaagcccacggtgcgcctcgccacccgcgacgacgtccccagggccgtacgcaccctcgccgccgcgttcgccgactaccccgccacgcgccacaccgtcgatccggaccgccacatcgagcgggtcaccgagctgcaagaactcttcctcacgcgcgtcgggctcgacatcggcaaggtgtgggtcgcggacgacggcgccgcggtggcggtctggaccacgccggagagcgtcgaagcgggggcggtgttcgccgagatcggcccgcgcatggccgagttgagcggttcccggctggccgcgcagcaacagatggaaggcctcctggcgccgcaccggcccaaggagcccgcgtggttcctggccaccgtcggcgtctcgcccgaccaccagggcaagggtctgggcagcgccgtcgtgctccccggagtggaggcggccgagcgcgccggggtgcccgccttcctggagacctccgcgccccgcaacctccccttctacgagcggctcggcttcaccgtcaccgccgacgtcgaggtgcccgaaggaccgcgcacctggtgcatgacccgcaagcccggtgcctgattctaaataaaggaaatttattttcattgcaatagtgtgttggaattttttgtgtctctcagagtccacgacgtgagtttggtttgtaagctgttatatgtaaaactagaacagcttatataactggaaccataaccttgccaccctttattggaagcataagcttgccgttgcggcaaagttatgggtaaagtcacatctaagctgtctctagcctttatttactgaatgggcagtaccagactcgaactgatgacaatcccaatggcgcgccgagcttggcgtaatcatggtcatagctgtttcctgtgtgaaattgttatccgctcacaattccacacaacatacgagccggaagcataaagtgtaaagcctggggtgcctaatgagtgagctaactcacattaattgcgttgcgctcactgcccgctttccagtcgggaaacctgtcgtgccagctgcattaatgaatcggccaacgcgcggggagaggcggtttgcgtattgggcgctcttccgcttcctcgctcactgactcgctgcgctcggtcgttcggctgcggcgagcggtatcagctcactcaaaggcggtaatacggttatccacagaatcaggggataacgcaggaaagaacatgtgagcaaaaggccagcaaaaggccagtaagatacattgatgagtttggacaaaccacaactagaatgcagtgaaaaaaatgctttatttgtgaaatttgtgatgctattgctttatttgtaaccattataagctgcaataaacaagttagctttttgcaaaagcctaggcctccaaaaaagcctcctcactacttctggaatagctcagaggcagaggcggcctcggcctctgcataaataaaaaaaattagtcagccatggggcggagaatgggcggaactgggcggagttaggggcgggatgggcggagttaggggcgggactatggttgctgactaattgagatgcatgctttgcatacttctgcctgctggggagcctggggactttccacacctggttgctgactaattgagatgcatgctttgcatacttctgcctgctggggagcctggggactttccacaccctaactgacacacgaaccgtaaaaaggccgcgttgctggcgtttttccataggctccgcccccctgacgagcatcacaaaatcacaaaaatcgacgctcaagtcagaggtggcgaaacccgacaggactataaagataccaggcgtttccccctggaagctccctcgtgcgctctcctgttccgaccctgccgcttaccggatacctgtccgcctttctcccttcgggaagcgtggcgctttctcatagctcacgctgtaggtatctcagttcggtgtaggtcgttcgctccaagctgggctgtgtgcacgaaccccccgttcagcccgaccgctgcgccttatccggtaactatcgtcttgagtccaacccggtaagacacgacttatcgccactggcagcagccactggtaacaggattagcagagcgaggtatgtaggcggtgctacagagttcttgaagtggtggcctaactacggctacactagaagaacagtatttggtatctgcgctctgctgaagccagttaccttcggaaaaagagttggtagctcttgatccggcaaacaaaccaccgctggtagcggtggtttttttgtttgcaagcagcagattacgcgcagaaaaaaaggatctcaagaagatcctttgatcttttctacggggtctgacgctcagtggaacgaaaactcacgttaagggattttggtcatgagattatcaaaaaggatcttcacctagatccttttaaattaaaaatgaagttttaaatcaatctaaagtatatatgagtaaacttggtctgacagttaccaatgcttaatcagtgaggcacctatctcagcgatctgtctatttcgttcatccatagttgcctgactccccgtcgtgtagataactacgatacgggagggcttaccatctggccccagtgctgcaatgataccgcgagacccacgctcaccggctccagatttatcagcaataaaccagccagccggaagggccgagcgcagaagtggtcctgcaactttatccgcctccatccagtctattaattgttgccgggaagctagagtaagtagttcgccagttaatagtttgcgcaacgttgttgccattgctacaggcatcgtggtgtcacgctcgtcgtttggtatggcttcattcagctccggttcccaacgatcaaggcgagttacatgatcccccatgttgtgcaaaaaagcggttagctccttcggtcctccgatcgttgtcagaagtaagttggccgcagtgttatcactcatggttatggcagcactgcataattctcttactgtcatgccatccgtaagatgcttttctgtgactggtgagtactcaaccaagtcattctgagaatagtgtatgcggcgaccgagttgctcttgcccggcgtcaatacgggataataccgcgccacatagcagaactttaaaagtgctcatcattggaaaacgttcttcggggcgaaaactctcaaggatcttaccgctgttgagatccagttcgatgtaacccactcgtgcacccaactgatcttcagcatcttttactttcaccagcgtttctgggtgagcaaaaacaggaaggcaaaatgccgcaaaaaagggaataagggcgacacggaaatgttgaatactcatactcttcctttttcaatattattgaagcatttatcagggttattgtctcatgagcggatacatatttgaatgtatttagaaaaataaacaaataggggttccgcgcacatttccccgaaaagtgccacctgacgtctaagaaaccattattatcatgacattaacctataaaaataggcgtatcacgaggccctttcgtc

SEQ ID NO: 378 - DNA, 3003 bp, Artificial Sequence
  Synthetic
aattctgtggaatgtgtgtcagttagggtgtggaaagtccccaggctccccagcaggcagaagtatgcaaagcatgcatctcaattagtcagcaaccaggtgtggaaagtccccaggctccccagcaggcagaagtatgcaaagcatgcatctcaattagtcagcaaccatagtcccgcccctaactccgcccatcccgcccctaactccgcccagttccgcccattctccgccccatggctgactaattttttttatttatgcagaggccgaggccgcctctgcctctgagctattccagaagtagtgaggaggcttttttggaggcctaggcttttgcaaaaagctaacttgtttattgcagcttataatggttacaaataaagcaatagcatcacaaatttcacaaataaagcatttttttcactgcattctagttgtggtttgtccaaactcatcaatgtatcttatcatgtctgtataccgtcgacctctagctagagcttggcgtaatcatggtcatagctgtttcctgtgtgaaattgttatccgctcacaattccacacaacatacgagccggaagcataaagtgtaaagcctggggtgcctaatgagtgagctaactcacattaattgcgttgcgctcactgcccgctttccagtcgggaaacctgtcgtgccagctgcattaatgaatcggccaacgcgcggggagaggcggtttgcgtattgggcgctcttccgcttcctcgctcactgactcgctgcgctcggtcgttcggctgcggcgagcggtatcagctcactcaaaggcggtaatacggttatccacagaatcaggggataacgcaggaaagaacatgtgagcaaaaggccagcaaaaggccaggaaccgtaaaaaggccgcgttgctggcgtttttccataggctccgcccccctgacgagcatcacaaaaatcgacgctcaagtcagaggtggcgaaacccgacaggactataaagataccaggcgtttccccctggaagctccctcgtgcgctctcctgttccgaccctgccgcttaccggatacctgtccgcctttctcccttcgggaagcgtggcgctttctcatagctcacgctgtaggtatctcagttcggtgtaggtcgttcgctccaagctgggctgtgtgcacgaaccccccgttcagcccgaccgctgcgccttatccggtaactatcgtcttgagtccaacccggtaagacacgacttatcgccactggcagcagccactggtaacaggattagcagagcgaggtatgtaggcggtgctacagagttcttgaagtggtggcctaactacggctacactagaagaacagtatttggtatctgcgctctgctgaagccagttaccttcggaaaaagagttggtagctcttgatccggcaaacaaaccaccgctggtagcggtttttttgtttgcaagcagcagattacgcgcagaaaaaaaggatctcaagaagatcctttgatcttttctacggggtctgacgctcagtggaacgaaaactcacgttaagggattttggtcatgagattatcaaaaaggatcttcacctagatccttttaaattaaaaatgaagttttaaatcaatctaaagtatatatgagtaaacttggtctgacagttaccaatgcttaatcagtgaggcacctatctcagcgatctgtctatttcgttcatccatagttgcctgactccccgtcgtgtagataactacgatacgggagggcttaccatctggccccagtgctgcaatgataccgcgagacccacgctcaccggctccagatttatcagcaataaaccagccagccggaagggccgagcgcagaagtggtcctgcaactttatccgcctccatccagtctattaattgttgccgggaagctagagtaagtagttcgccagttaatagtttgcgcaacgttgttgccattgctacaggcatcgtggtgtcacgctcgtcgtttggtatggcttcattcagctccggttcccaacgatcaaggcgagttacatgatcccccatgttgtgcaaaaaagcggttagctccttcggtcctccgatcgttgtcagaagtaagttggccgcagtgttatcactcatggttatggcagcactgcataattctcttactgtcatgccatccgtaagatgcttttctgtgactggtgagtactcaaccaagtcattctgagaatagtgtatgcggcgaccgagttgctcttgcccggcgtcaatacgggataataccgcgccacatagcagaactttaaaagtgctcatcattggaaaacgttcttcggggcgaaaactctcaaggatcttaccgctgttgagatccagttcgatgtaacccactcgtgcacccaactgatcttcagcatcttttactttcaccagcgtttctgggtgagcaaaaacaggaaggcaaaatgccgcaaaaaagggaataagggcgacacggaaatgttgaatactcatactcttcctttttcaatattattgaagcatttatcagggttattgtctcatgagcggatacatatttgaatgtatttagaaaaataaacaaataggggttccgcgcacatttccccgaaaagtgccacctgagggcctatttcccatgattccttcatatttgcatatacgatacaaggctgttagagagataattagaattaatttgactgtaaacacaaagatattagtacaaaatacgtgacgtagaaagtaataatttcttgggtagtttgcagttttaaaattatgttttaaaatggactatcatatgcttaccgtaacttgaaagtatttcgatttcttggctttatatatcttgtggaaaggacgtgagtcgtggctttatgccgttaggcgttgctcaaagtcttctctgaagacagtgagtcgtggctttatgccgttaggcgttgctcaatttttt

SEQ ID NO: 379 - DNA, 3021 bp, Artificial Sequence
  Synthetic
aattctgtggaatgtgtgtcagttagggtgtggaaagtccccaggctccccagcaggcagaagtatgcaaagcatgcatctcaattagtcagcaaccaggtgtggaaagtccccaggctccccagcaggcagaagtatgcaaagcatgcatctcaattagtcagcaaccatagtcccgcccctaactccgcccatcccgcccctaactccgcccagttccgcccattctccgccccatggctgactaattttttttatttatgcagaggccgaggccgcctctgcctctgagctattccagaagtagtgaggaggcttttttggaggcctaggcttttgcaaaaagctaacttgtttattgcagcttataatggttacaaataaagcaatagcatcacaaatttcacaaataaagcatttttttcactgcattctagttgtggtttgtccaaactcatcaatgtatcttatcatgtctgtataccgtcgacctctagctagagcttggcgtaatcatggtcatagctgtttcctgtgtgaaattgttatccgctcacaattccacacaacatacgagccggaagcataaagtgtaaagcctggggtgcctaatgagtgagctaactcacattaattgcgttgcgctcactgcccgctttccagtcgggaaacctgtcgtgccagctgcattaatgaatcggccaacgcgcggggagaggcggtttgcgtattgggcgctcttccgcttcctcgctcactgactcgctgcgctcggtcgttcggctgcggcgagcggtatcagctcactcaaaggcggtaatacggttatccacagaatcaggggataacgcaggaaagaacatgtgagcaaaaggccagcaaaaggccaggaaccgtaaaaaggccgcgttgctggcgtttttccataggctccgcccccctgacgagcatcacaaaaatcgacgctcaagtcagaggtggcgaaacccgacaggactataaagataccaggcgtttccccctggaagctccctcgtgcgctctcctgttccgaccctgccgcttaccggatacctgtccgcctttctcccttcgggaagcgtggcgctttctcatagctcacgctgtaggtatctcagttcggtgtaggtcgttcgctccaagctgggctgtgtgcacgaaccccccgttcagcccgaccgctgcgccttatccggtaactatcgtcttgagtccaacccggtaagacacgacttatcgccactggcagcagccactggtaacaggattagcagagcgaggtatgtaggcggtgctacagagttcttgaagtggtggcctaactacggctacactagaagaacagtatttggtatctgcgctctgctgaagccagttaccttcggaaaaagagttggtagctcttgatccggcaaacaaaccaccgctggtagcggtttttttgtttgcaagcagcagattacgcgcagaaaaaaaggatctcaagaagatcctttgatcttttctacggggtctgacgctcagtggaacgaaaactcacgttaagggattttggtcatgagattatcaaaaaggatcttcacctagatccttttaaattaaaaatgaagttttaaatcaatctaaagtatatatgagtaaacttggtctgacagttaccaatgcttaatcagtgaggcacctatctcagcgatctgtctatttcgttcatccatagttgcctgactccccgtcgtgtagataactacgatacgggagggcttaccatctggccccagtgctgcaatgataccgcgagacccacgctcaccggctccagatttatcagcaataaaccagccagccggaagggccgagcgcagaagtggtcctgcaactttatccgcctccatccagtctattaattgttgccgggaagctagagtaagtagttcgccagttaatagtttgcgcaacgttgttgccattgctacaggcatcgtggtgtcacgctcgtcgtttggtatggcttcattcagctccggttcccaacgatcaaggcgagttacatgatcccccatgttgtgcaaaaaagcggttagctccttcggtcctccgatcgttgtcagaagtaagttggccgcagtgttatcactcatggttatggcagcactgcataattctcttactgtcatgccatccgtaagatgcttttctgtgactggtgagtactcaaccaagtcattctgagaatagtgtatgcggcgaccgagttgctcttgcccggcgtcaatacgggataataccgcgccacatagcagaactttaaaagtgctcatcattggaaaacgttcttcggggcgaaaactctcaaggatcttaccgctgttgagatccagttcgatgtaacccactcgtgcacccaactgatcttcagcatcttttactttcaccagcgtttctgggtgagcaaaaacaggaaggcaaaatgccgcaaaaaagggaataagggcgacacggaaatgttgaatactcatactcttcctttttcaatattattgaagcatttatcagggttattgtctcatgagcggatacatatttgaatgtatttagaaaaataaacaaataggggttccgcgcacatttccccgaaaagtgccacctgagggcctatttcccatgattccttcatatttgcatatacgatacaaggctgttagagagataattagaattaatttgactgtaaacacaaagatattagtacaaaatacgtgacgtagaaagtaataatttcttgggtagtttgcagttttaaaattatgttttaaaatggactatcatatgcttaccgtaacttgaaagtatttcgatttcttggctttatatatcttgtggaaaggacgtgagtcgtggctttatgccgttaggcgttgctcaagggaggacatcgatgtcacctccaatgactagggtgtgagtcgtggctttatgccgttaggcgttgctcaatttttt

SEQ ID NO: 380 - DNA, 3021 bp, Artificial Sequence
  Synthetic
aattctgtggaatgtgtgtcagttagggtgtggaaagtccccaggctccccagcaggcagaagtatgcaaagcatgcatctcaattagtcagcaaccaggtgtggaaagtccccaggctccccagcaggcagaagtatgcaaagcatgcatctcaattagtcagcaaccatagtcccgcccctaactccgcccatcccgcccctaactccgcccagttccgcccattctccgccccatggctgactaattttttttatttatgcagaggccgaggccgcctctgcctctgagctattccagaagtagtgaggaggcttttttggaggcctaggcttttgcaaaaagctaacttgtttattgcagcttataatggttacaaataaagcaatagcatcacaaatttcacaaataaagcatttttttcactgcattctagttgtggtttgtccaaactcatcaatgtatcttatcatgtctgtataccgtcgacctctagctagagcttggcgtaatcatggtcatagctgtttcctgtgtgaaattgttatccgctcacaattccacacaacatacgagccggaagcataaagtgtaaagcctggggtgcctaatgagtgagctaactcacattaattgcgttgcgctcactgcccgctttccagtcgggaaacctgtcgtgccagctgcattaatgaatcggccaacgcgcggggagaggcggtttgcgtattgggcgctcttccgcttcctcgctcactgactcgctgcgctcggtcgttcggctgcggcgagcggtatcagctcactcaaaggcggtaatacggttatccacagaatcaggggataacgcaggaaagaacatgtgagcaaaaggccagcaaaaggccaggaaccgtaaaaaggccgcgttgctggcgtttttccataggctccgcccccctgacgagcatcacaaaaatcgacgctcaagtcagaggtggcgaaacccgacaggactataaagataccaggcgtttccccctggaagctccctcgtgcgctctcctgttccgaccctgccgcttaccggatacctgtccgcctttctcccttcgggaagcgtggcgctttctcatagctcacgctgtaggtatctcagttcggtgtaggtcgttcgctccaagctgggctgtgtgcacgaaccccccgttcagcccgaccgctgcgccttatccggtaactatcgtcttgagtccaacccggtaagacacgacttatcgccactggcagcagccactggtaacaggattagcagagcgaggtatgtaggcggtgctacagagttcttgaagtggtggcctaactacggctacactagaagaacagtatttggtatctgcgctctgctgaagccagttaccttcggaaaaagagttggtagctcttgatccggcaaacaaaccaccgctggtagcggtttttttgtttgcaagcagcagattacgcgcagaaaaaaaggatctcaagaagatcctttgatcttttctacggggtctgacgctcagtggaacgaaaactcacgttaagggattttggtcatgagattatcaaaaaggatcttcacctagatccttttaaattaaaaatgaagttttaaatcaatctaaagtatatatgagtaaacttggtctgacagttaccaatgcttaatcagtgaggcacctatctcagcgatctgtctatttcgttcatccatagttgcctgactccccgtcgtgtagataactacgatacgggagggcttaccatctggccccagtgctgcaatgataccgcgagacccacgctcaccggctccagatttatcagcaataaaccagccagccggaagggccgagcgcagaagtggtcctgcaactttatccgcctccatccagtctattaattgttgccgggaagctagagtaagtagttcgccagttaatagtttgcgcaacgttgttgccattgctacaggcatcgtggtgtcacgctcgtcgtttggtatggcttcattcagctccggttcccaacgatcaaggcgagttacatgatcccccatgttgtgcaaaaaagcggttagctccttcggtcctccgatcgttgtcagaagtaagttggccgcagtgttatcactcatggttatggcagcactgcataattctcttactgtcatgccatccgtaagatgcttttctgtgactggtgagtactcaaccaagtcattctgagaatagtgtatgcggcgaccgagttgctcttgcccggcgtcaatacgggataataccgcgccacatagcagaactttaaaagtgctcatcattggaaaacgttcttcggggcgaaaactctcaaggatcttaccgctgttgagatccagttcgatgtaacccactcgtgcacccaactgatcttcagcatcttttactttcaccagcgtttctgggtgagcaaaaacaggaaggcaaaatgccgcaaaaaagggaataagggcgacacggaaatgttgaatactcatactcttcctttttcaatattattgaagcatttatcagggttattgtctcatgagcggatacatatttgaatgtatttagaaaaataaacaaataggggttccgcgcacatttccccgaaaagtgccacctgagggcctatttcccatgattccttcatatttgcatatacgatacaaggctgttagagagataattagaattaatttgactgtaaacacaaagatattagtacaaaatacgtgacgtagaaagtaataatttcttgggtagtttgcagttttaaaattatgttttaaaatggactatcatatgcttaccgtaacttgaaagtatttcgatttcttggctttatatatcttgtggaaaggacgtgagtcgtggctttatgccgttaggcgttgctcaattaacagctgacccaataagtggcagagtgctaaggtgagtcgtggctttatgccgttaggcgttgctcaatttttt

SEQ ID NO: 381 - DNA, 3021 bp, Artificial Sequence
  Synthetic
aattctgtggaatgtgtgtcagttagggtgtggaaagtccccaggctccccagcaggcagaagtatgcaaagcatgcatctcaattagtcagcaaccaggtgtggaaagtccccaggctccccagcaggcagaagtatgcaaagcatgcatctcaattagtcagcaaccatagtcccgcccctaactccgcccatcccgcccctaactccgcccagttccgcccattctccgccccatggctgactaattttttttatttatgcagaggccgaggccgcctctgcctctgagctattccagaagtagtgaggaggcttttttggaggcctaggcttttgcaaaaagctaacttgtttattgcagcttataatggttacaaataaagcaatagcatcacaaatttcacaaataaagcatttttttcactgcattctagttgtggtttgtccaaactcatcaatgtatcttatcatgtctgtataccgtcgacctctagctagagcttggcgtaatcatggtcatagctgtttcctgtgtgaaattgttatccgctcacaattccacacaacatacgagccggaagcataaagtgtaaagcctggggtgcctaatgagtgagctaactcacattaattgcgttgcgctcactgcccgctttccagtcgggaaacctgtcgtgccagctgcattaatgaatcggccaacgcgcggggagaggcggtttgcgtattgggcgctcttccgcttcctcgctcactgactcgctgcgctcggtcgttcggctgcggcgagcggtatcagctcactcaaaggcggtaatacggttatccacagaatcaggggataacgcaggaaagaacatgtgagcaaaaggccagcaaaaggccaggaaccgtaaaaaggccgcgttgctggcgtttttccataggctccgcccccctgacgagcatcacaaaaatcgacgctcaagtcagaggtggcgaaacccgacaggactataaagataccaggcgtttccccctggaagctccctcgtgcgctctcctgttccgaccctgccgcttaccggatacctgtccgcctttctcccttcgggaagcgtggcgctttctcatagctcacgctgtaggtatctcagttcggtgtaggtcgttcgctccaagctgggctgtgtgcacgaaccccccgttcagcccgaccgctgcgccttatccggtaactatcgtcttgagtccaacccggtaagacacgacttatcgccactggcagcagccactggtaacaggattagcagagcgaggtatgtaggcggtgctacagagttcttgaagtggtggcctaactacggctacactagaagaacagtatttggtatctgcgctctgctgaagccagttaccttcggaaaaagagttggtagctcttgatccggcaaacaaaccaccgctggtagcggtttttttgtttgcaagcagcagattacgcgcagaaaaaaaggatctcaagaagatcctttgatcttttctacggggtctgacgctcagtggaacgaaaactcacgttaagggattttggtcatgagattatcaaaaaggatcttcacctagatccttttaaattaaaaatgaagttttaaatcaatctaaagtatatatgagtaaacttggtctgacagttaccaatgcttaatcagtgaggcacctatctcagcgatctgtctatttcgttcatccatagttgcctgactccccgtcgtgtagataactacgatacgggagggcttaccatctggccccagtgctgcaatgataccgcgagacccacgctcaccggctccagatttatcagcaataaaccagccagccggaagggccgagcgcagaagtggtcctgcaactttatccgcctccatccagtctattaattgttgccgggaagctagagtaagtagttcgccagttaatagtttgcgcaacgttgttgccattgctacaggcatcgtggtgtcacgctcgtcgtttggtatggcttcattcagctccggttcccaacgatcaaggcgagttacatgatcccccatgttgtgcaaaaaagcggttagctccttcggtcctccgatcgttgtcagaagtaagttggccgcagtgttatcactcatggttatggcagcactgcataattctcttactgtcatgccatccgtaagatgcttttctgtgactggtgagtactcaaccaagtcattctgagaatagtgtatgcggcgaccgagttgctcttgcccggcgtcaatacgggataataccgcgccacatagcagaactttaaaagtgctcatcattggaaaacgttcttcggggcgaaaactctcaaggatcttaccgctgttgagatccagttcgatgtaacccactcgtgcacccaactgatcttcagcatcttttactttcaccagcgtttctgggtgagcaaaaacaggaaggcaaaatgccgcaaaaaagggaataagggcgacacggaaatgttgaatactcatactcttcctttttcaatattattgaagcatttatcagggttattgtctcatgagcggatacatatttgaatgtatttagaaaaataaacaaataggggttccgcgcacatttccccgaaaagtgccacctgagggcctatttcccatgattccttcatatttgcatatacgatacaaggctgttagagagataattagaattaatttgactgtaaacacaaagatattagtacaaaatacgtgacgtagaaagtaataatttcttgggtagtttgcagttttaaaattatgttttaaaatggactatcatatgcttaccgtaacttgaaagtatttcgatttcttggctttatatatcttgtggaaaggacgtgagtcgtggctttatgccgttaggcgttgctcaagaccatcaggaaacattaacgtactgatgttaacagtgagtcgtggctttatgccgttaggcgttgctcaatttttt

SEQ ID NO: 382 - DNA, 3021 bp, Artificial Sequence
  Synthetic
aattctgtggaatgtgtgtcagttagggtgtggaaagtccccaggctccccagcaggcagaagtatgcaaagcatgcatctcaattagtcagcaaccaggtgtggaaagtccccaggctccccagcaggcagaagtatgcaaagcatgcatctcaattagtcagcaaccatagtcccgcccctaactccgcccatcccgcccctaactccgcccagttccgcccattctccgccccatggctgactaattttttttatttatgcagaggccgaggccgcctctgcctctgagctattccagaagtagtgaggaggcttttttggaggcctaggcttttgcaaaaagctaacttgtttattgcagcttataatggttacaaataaagcaatagcatcacaaatttcacaaataaagcatttttttcactgcattctagttgtggtttgtccaaactcatcaatgtatcttatcatgtctgtataccgtcgacctctagctagagcttggcgtaatcatggtcatagctgtttcctgtgtgaaattgttatccgctcacaattccacacaacatacgagccggaagcataaagtgtaaagcctggggtgcctaatgagtgagctaactcacattaattgcgttgcgctcactgcccgctttccagtcgggaaacctgtcgtgccagctgcattaatgaatcggccaacgcgcggggagaggcggtttgcgtattgggcgctcttccgcttcctcgctcactgactcgctgcgctcggtcgttcggctgcggcgagcggtatcagctcactcaaaggcggtaatacggttatccacagaatcaggggataacgcaggaaagaacatgtgagcaaaaggccagcaaaaggccaggaaccgtaaaaaggccgcgttgctggcgtttttccataggctccgcccccctgacgagcatcacaaaaatcgacgctcaagtcagaggtggcgaaacccgacaggactataaagataccaggcgtttccccctggaagctccctcgtgcgctctcctgttccgaccctgccgcttaccggatacctgtccgcctttctcccttcgggaagcgtggcgctttctcatagctcacgctgtaggtatctcagttcggtgtaggtcgttcgctccaagctgggctgtgtgcacgaaccccccgttcagcccgaccgctgcgccttatccggtaactatcgtcttgagtccaacccggtaagacacgacttatcgccactggcagcagccactggtaacaggattagcagagcgaggtatgtaggcggtgctacagagttcttgaagtggtggcctaactacggctacactagaagaacagtatttggtatctgcgctctgctgaagccagttaccttcggaaaaagagttggtagctcttgatccggcaaacaaaccaccgctggtagcggtttttttgtttgcaagcagcagattacgcgcagaaaaaaaggatctcaagaagatcctttgatcttttctacggggtctgacgctcagtggaacgaaaactcacgttaagggattttggtcatgagattatcaaaaaggatcttcacctagatccttttaaattaaaaatgaagttttaaatcaatctaaagtatatatgagtaaacttggtctgacagttaccaatgcttaatcagtgaggcacctatctcagcgatctgtctatttcgttcatccatagttgcctgactccccgtcgtgtagataactacgatacgggagggcttaccatctggccccagtgctgcaatgataccgcgagacccacgctcaccggctccagatttatcagcaataaaccagccagccggaagggccgagcgcagaagtggtcctgcaactttatccgcctccatccagtctattaattgttgccgggaagctagagtaagtagttcgccagttaatagtttgcgcaacgttgttgccattgctacaggcatcgtggtgtcacgctcgtcgtttggtatggcttcattcagctccggttcccaacgatcaaggcgagttacatgatcccccatgttgtgcaaaaaagcggttagctccttcggtcctccgatcgttgtcagaagtaagttggccgcagtgttatcactcatggttatggcagcactgcataattctcttactgtcatgccatccgtaagatgcttttctgtgactggtgagtactcaaccaagtcattctgagaatagtgtatgcggcgaccgagttgctcttgcccggcgtcaatacgggataataccgcgccacatagcagaactttaaaagtgctcatcattggaaaacgttcttcggggcgaaaactctcaaggatcttaccgctgttgagatccagttcgatgtaacccactcgtgcacccaactgatcttcagcatcttttactttcaccagcgtttctgggtgagcaaaaacaggaaggcaaaatgccgcaaaaaagggaataagggcgacacggaaatgttgaatactcatactcttcctttttcaatattattgaagcatttatcagggttattgtctcatgagcggatacatatttgaatgtatttagaaaaataaacaaataggggttccgcgcacatttccccgaaaagtgccacctgagggcctatttcccatgattccttcatatttgcatatacgatacaaggctgttagagagataattagaattaatttgactgtaaacacaaagatattagtacaaaatacgtgacgtagaaagtaataatttcttgggtagtttgcagttttaaaattatgttttaaaatggactatcatatgcttaccgtaacttgaaagtatttcgatttcttggctttatatatcttgtggaaaggacgtgagtcgtggctttatgccgttaggcgttgctcaattaaaaacacaacatcagtgcatgttggggattccgtgagtcgtggctttatgccgttaggcgttgctcaatttttt

SEQ ID NO: 383 - DNA, 3021 bp, Artificial Sequence
  Synthetic
aattctgtggaatgtgtgtcagttagggtgtggaaagtccccaggctccccagcaggcagaagtatgcaaagcatgcatctcaattagtcagcaaccaggtgtggaaagtccccaggctccccagcaggcagaagtatgcaaagcatgcatctcaattagtcagcaaccatagtcccgcccctaactccgcccatcccgcccctaactccgcccagttccgcccattctccgccccatggctgactaattttttttatttatgcagaggccgaggccgcctctgcctctgagctattccagaagtagtgaggaggcttttttggaggcctaggcttttgcaaaaagctaacttgtttattgcagcttataatggttacaaataaagcaatagcatcacaaatttcacaaataaagcatttttttcactgcattctagttgtggtttgtccaaactcatcaatgtatcttatcatgtctgtataccgtcgacctctagctagagcttggcgtaatcatggtcatagctgtttcctgtgtgaaattgttatccgctcacaattccacacaacatacgagccggaagcataaagtgtaaagcctggggtgcctaatgagtgagctaactcacattaattgcgttgcgctcactgcccgctttccagtcgggaaacctgtcgtgccagctgcattaatgaatcggccaacgcgcggggagaggcggtttgcgtattgggcgctcttccgcttcctcgctcactgactcgctgcgctcggtcgttcggctgcggcgagcggtatcagctcactcaaaggcggtaatacggttatccacagaatcaggggataacgcaggaaagaacatgtgagcaaaaggccagcaaaaggccaggaaccgtaaaaaggccgcgttgctggcgtttttccataggctccgcccccctgacgagcatcacaaaaatcgacgctcaagtcagaggtggcgaaacccgacaggactataaagataccaggcgtttccccctggaagctccctcgtgcgctctcctgttccgaccctgccgcttaccggatacctgtccgcctttctcccttcgggaagcgtggcgctttctcatagctcacgctgtaggtatctcagttcggtgtaggtcgttcgctccaagctgggctgtgtgcacgaaccccccgttcagcccgaccgctgcgccttatccggtaactatcgtcttgagtccaacccggtaagacacgacttatcgccactggcagcagccactggtaacaggattagcagagcgaggtatgtaggcggtgctacagagttcttgaagtggtggcctaactacggctacactagaagaacagtatttggtatctgcgctctgctgaagccagttaccttcggaaaaagagttggtagctcttgatccggcaaacaaaccaccgctggtagcggtttttttgtttgcaagcagcagattacgcgcagaaaaaaaggatctcaagaagatcctttgatcttttctacggggtctgacgctcagtggaacgaaaactcacgttaagggattttggtcatgagattatcaaaaaggatcttcacctagatccttttaaattaaaaatgaagttttaaatcaatctaaagtatatatgagtaaacttggtctgacagttaccaatgcttaatcagtgaggcacctatctcagcgatctgtctatttcgttcatccatagttgcctgactccccgtcgtgtagataactacgatacgggagggcttaccatctggccccagtgctgcaatgataccgcgagacccacgctcaccggctccagatttatcagcaataaaccagccagccggaagggccgagcgcagaagtggtcctgcaactttatccgcctccatccagtctattaattgttgccgggaagctagagtaagtagttcgccagttaatagtttgcgcaacgttgttgccattgctacaggcatcgtggtgtcacgctcgtcgtttggtatggcttcattcagctccggttcccaacgatcaaggcgagttacatgatcccccatgttgtgcaaaaaagcggttagctccttcggtcctccgatcgttgtcagaagtaagttggccgcagtgttatcactcatggttatggcagcactgcataattctcttactgtcatgccatccgtaagatgcttttctgtgactggtgagtactcaaccaagtcattctgagaatagtgtatgcggcgaccgagttgctcttgcccggcgtcaatacgggataataccgcgccacatagcagaactttaaaagtgctcatcattggaaaacgttcttcggggcgaaaactctcaaggatcttaccgctgttgagatccagttcgatgtaacccactcgtgcacccaactgatcttcagcatcttttactttcaccagcgtttctgggtgagcaaaaacaggaaggcaaaatgccgcaaaaaagggaataagggcgacacggaaatgttgaatactcatactcttcctttttcaatattattgaagcatttatcagggttattgtctcatgagcggatacatatttgaatgtatttagaaaaataaacaaataggggttccgcgcacatttccccgaaaagtgccacctgagggcctatttcccatgattccttcatatttgcatatacgatacaaggctgttagagagataattagaattaatttgactgtaaacacaaagatattagtacaaaatacgtgacgtagaaagtaataatttcttgggtagtttgcagttttaaaattatgttttaaaatggactatcatatgcttaccgtaacttgaaagtatttcgatttcttggctttatatatcttgtggaaaggacgtgagtcgtggctttatgccgttaggcgttgctcaacggaaggatcccacaatcactctcagaatgttctcgtgagtcgtggctttatgccgttaggcgttgctcaatttttt

SEQ ID NO: 384 - DNA, 3021 bp, Artificial Sequence
  Synthetic
aattctgtggaatgtgtgtcagttagggtgtggaaagtccccaggctccccagcaggcagaagtatgcaaagcatgcatctcaattagtcagcaaccaggtgtggaaagtccccaggctccccagcaggcagaagtatgcaaagcatgcatctcaattagtcagcaaccatagtcccgcccctaactccgcccatcccgcccctaactccgcccagttccgcccattctccgccccatggctgactaattttttttatttatgcagaggccgaggccgcctctgcctctgagctattccagaagtagtgaggaggcttttttggaggcctaggcttttgcaaaaagctaacttgtttattgcagcttataatggttacaaataaagcaatagcatcacaaatttcacaaataaagcatttttttcactgcattctagttgtggtttgtccaaactcatcaatgtatcttatcatgtctgtataccgtcgacctctagctagagcttggcgtaatcatggtcatagctgtttcctgtgtgaaattgttatccgctcacaattccacacaacatacgagccggaagcataaagtgtaaagcctggggtgcctaatgagtgagctaactcacattaattgcgttgcgctcactgcccgctttccagtcgggaaacctgtcgtgccagctgcattaatgaatcggccaacgcgcggggagaggcggtttgcgtattgggcgctcttccgcttcctcgctcactgactcgctgcgctcggtcgttcggctgcggcgagcggtatcagctcactcaaaggcggtaatacggttatccacagaatcaggggataacgcaggaaagaacatgtgagcaaaaggccagcaaaaggccaggaaccgtaaaaaggccgcgttgctggcgtttttccataggctccgcccccctgacgagcatcacaaaaatcgacgctcaagtcagaggtggcgaaacccgacaggactataaagataccaggcgtttccccctggaagctccctcgtgcgctctcctgttccgaccctgccgcttaccggatacctgtccgcctttctcccttcgggaagcgtggcgctttctcatagctcacgctgtaggtatctcagttcggtgtaggtcgttcgctccaagctgggctgtgtgcacgaaccccccgttcagcccgaccgctgcgccttatccggtaactatcgtcttgagtccaacccggtaagacacgacttatcgccactggcagcagccactggtaacaggattagcagagcgaggtatgtaggcggtgctacagagttcttgaagtggtggcctaactacggctacactagaagaacagtatttggtatctgcgctctgctgaagccagttaccttcggaaaaagagttggtagctcttgatccggcaaacaaaccaccgctggtagcggtttttttgtttgcaagcagcagattacgcgcagaaaaaaaggatctcaagaagatcctttgatcttttctacggggtctgacgctcagtggaacgaaaactcacgttaagggattttggtcatgagattatcaaaaaggatcttcacctagatccttttaaattaaaaatgaagttttaaatcaatctaaagtatatatgagtaaacttggtctgacagttaccaatgcttaatcagtgaggcacctatctcagcgatctgtctatttcgttcatccatagttgcctgactccccgtcgtgtagataactacgatacgggagggcttaccatctggccccagtgctgcaatgataccgcgagacccacgctcaccggctccagatttatcagcaataaaccagccagccggaagggccgagcgcagaagtggtcctgcaactttatccgcctccatccagtctattaattgttgccgggaagctagagtaagtagttcgccagttaatagtttgcgcaacgttgttgccattgctacaggcatcgtggtgtcacgctcgtcgtttggtatggcttcattcagctccggttcccaacgatcaaggcgagttacatgatcccccatgttgtgcaaaaaagcggttagctccttcggtcctccgatcgttgtcagaagtaagttggccgcagtgttatcactcatggttatggcagcactgcataattctcttactgtcatgccatccgtaagatgcttttctgtgactggtgagtactcaaccaagtcattctgagaatagtgtatgcggcgaccgagttgctcttgcccggcgtcaatacgggataataccgcgccacatagcagaactttaaaagtgctcatcattggaaaacgttcttcggggcgaaaactctcaaggatcttaccgctgttgagatccagttcgatgtaacccactcgtgcacccaactgatcttcagcatcttttactttcaccagcgtttctgggtgagcaaaaacaggaaggcaaaatgccgcaaaaaagggaataagggcgacacggaaatgttgaatactcatactcttcctttttcaatattattgaagcatttatcagggttattgtctcatgagcggatacatatttgaatgtatttagaaaaataaacaaataggggttccgcgcacatttccccgaaaagtgccacctgagggcctatttcccatgattccttcatatttgcatatacgatacaaggctgttagagagataattagaattaatttgactgtaaacacaaagatattagtacaaaatacgtgacgtagaaagtaataatttcttgggtagtttgcagttttaaaattatgttttaaaatggactatcatatgcttaccgtaacttgaaagtatttcgatttcttggctttatatatcttgtggaaaggacgtgagtcgtggctttatgccgttaggcgttgctcaatgactagagagggtccattttgaggatgggggtgtgtgagtcgtggctttatgccgttaggcgttgctcaatttttt

SEQ ID NO: 385 - DNA, 3021 bp, Artificial Sequence
  Synthetic
aattctgtggaatgtgtgtcagttagggtgtggaaagtccccaggctccccagcaggcagaagtatgcaaagcatgcatctcaattagtcagcaaccaggtgtggaaagtccccaggctccccagcaggcagaagtatgcaaagcatgcatctcaattagtcagcaaccatagtcccgcccctaactccgcccatcccgcccctaactccgcccagttccgcccattctccgccccatggctgactaattttttttatttatgcagaggccgaggccgcctctgcctctgagctattccagaagtagtgaggaggcttttttggaggcctaggcttttgcaaaaagctaacttgtttattgcagcttataatggttacaaataaagcaatagcatcacaaatttcacaaataaagcatttttttcactgcattctagttgtggtttgtccaaactcatcaatgtatcttatcatgtctgtataccgtcgacctctagctagagcttggcgtaatcatggtcatagctgtttcctgtgtgaaattgttatccgctcacaattccacacaacatacgagccggaagcataaagtgtaaagcctggggtgcctaatgagtgagctaactcacattaattgcgttgcgctcactgcccgctttccagtcgggaaacctgtcgtgccagctgcattaatgaatcggccaacgcgcggggagaggcggtttgcgtattgggcgctcttccgcttcctcgctcactgactcgctgcgctcggtcgttcggctgcggcgagcggtatcagctcactcaaaggcggtaatacggttatccacagaatcaggggataacgcaggaaagaacatgtgagcaaaaggccagcaaaaggccaggaaccgtaaaaaggccgcgttgctggcgtttttccataggctccgcccccctgacgagcatcacaaaaatcgacgctcaagtcagaggtggcgaaacccgacaggactataaagataccaggcgtttccccctggaagctccctcgtgcgctctcctgttccgaccctgccgcttaccggatacctgtccgcctttctcccttcgggaagcgtggcgctttctcatagctcacgctgtaggtatctcagttcggtgtaggtcgttcgctccaagctgggctgtgtgcacgaaccccccgttcagcccgaccgctgcgccttatccggtaactatcgtcttgagtccaacccggtaagacacgacttatcgccactggcagcagccactggtaacaggattagcagagcgaggtatgtaggcggtgctacagagttcttgaagtggtggcctaactacggctacactagaagaacagtatttggtatctgcgctctgctgaagccagttaccttcggaaaaagagttggtagctcttgatccggcaaacaaaccaccgctggtagcggtttttttgtttgcaagcagcagattacgcgcagaaaaaaaggatctcaagaagatcctttgatcttttctacggggtctgacgctcagtggaacgaaaactcacgttaagggattttggtcatgagattatcaaaaaggatcttcacctagatccttttaaattaaaaatgaagttttaaatcaatctaaagtatatatgagtaaacttggtctgacagttaccaatgcttaatcagtgaggcacctatctcagcgatctgtctatttcgttcatccatagttgcctgactccccgtcgtgtagataactacgatacgggagggcttaccatctggccccagtgctgcaatgataccgcgagacccacgctcaccggctccagatttatcagcaataaaccagccagccggaagggccgagcgcagaagtggtcctgcaactttatccgcctccatccagtctattaattgttgccgggaagctagagtaagtagttcgccagttaatagtttgcgcaacgttgttgccattgctacaggcatcgtggtgtcacgctcgtcgtttggtatggcttcattcagctccggttcccaacgatcaaggcgagttacatgatcccccatgttgtgcaaaaaagcggttagctccttcggtcctccgatcgttgtcagaagtaagttggccgcagtgttatcactcatggttatggcagcactgcataattctcttactgtcatgccatccgtaagatgcttttctgtgactggtgagtactcaaccaagtcattctgagaatagtgtatgcggcgaccgagttgctcttgcccggcgtcaatacgggataataccgcgccacatagcagaactttaaaagtgctcatcattggaaaacgttcttcggggcgaaaactctcaaggatcttaccgctgttgagatccagttcgatgtaacccactcgtgcacccaactgatcttcagcatcttttactttcaccagcgtttctgggtgagcaaaaacaggaaggcaaaatgccgcaaaaaagggaataagggcgacacggaaatgttgaatactcatactcttcctttttcaatattattgaagcatttatcagggttattgtctcatgagcggatacatatttgaatgtatttagaaaaataaacaaataggggttccgcgcacatttccccgaaaagtgccacctgagggcctatttcccatgattccttcatatttgcatatacgatacaaggctgttagagagataattagaattaatttgactgtaaacacaaagatattagtacaaaatacgtgacgtagaaagtaataatttcttgggtagtttgcagttttaaaattatgttttaaaatggactatcatatgcttaccgtaacttgaaagtatttcgatttcttggctttatatatcttgtggaaaggacgtgagtcgtggctttatgccgttaggcgttgctcaacccatgccttgctctctttctgtcctcagtggtccgtgagtcgtggctttatgccgttaggcgttgctcaatttttt

SEQ ID NO: 386 - DNA, 3021 bp, Artificial Sequence
  Synthetic
aattctgtggaatgtgtgtcagttagggtgtggaaagtccccaggctccccagcaggcagaagtatgcaaagcatgcatctcaattagtcagcaaccaggtgtggaaagtccccaggctccccagcaggcagaagtatgcaaagcatgcatctcaattagtcagcaaccatagtcccgcccctaactccgcccatcccgcccctaactccgcccagttccgcccattctccgccccatggctgactaattttttttatttatgcagaggccgaggccgcctctgcctctgagctattccagaagtagtgaggaggcttttttggaggcctaggcttttgcaaaaagctaacttgtttattgcagcttataatggttacaaataaagcaatagcatcacaaatttcacaaataaagcatttttttcactgcattctagttgtggtttgtccaaactcatcaatgtatcttatcatgtctgtataccgtcgacctctagctagagcttggcgtaatcatggtcatagctgtttcctgtgtgaaattgttatccgctcacaattccacacaacatacgagccggaagcataaagtgtaaagcctggggtgcctaatgagtgagctaactcacattaattgcgttgcgctcactgcccgctttccagtcgggaaacctgtcgtgccagctgcattaatgaatcggccaacgcgcggggagaggcggtttgcgtattgggcgctcttccgcttcctcgctcactgactcgctgcgctcggtcgttcggctgcggcgagcggtatcagctcactcaaaggcggtaatacggttatccacagaatcaggggataacgcaggaaagaacatgtgagcaaaaggccagcaaaaggccaggaaccgtaaaaaggccgcgttgctggcgtttttccataggctccgcccccctgacgagcatcacaaaaatcgacgctcaagtcagaggtggcgaaacccgacaggactataaagataccaggcgtttccccctggaagctccctcgtgcgctctcctgttccgaccctgccgcttaccggatacctgtccgcctttctcccttcgggaagcgtggcgctttctcatagctcacgctgtaggtatctcagttcggtgtaggtcgttcgctccaagctgggctgtgtgcacgaaccccccgttcagcccgaccgctgcgccttatccggtaactatcgtcttgagtccaacccggtaagacacgacttatcgccactggcagcagccactggtaacaggattagcagagcgaggtatgtaggcggtgctacagagttcttgaagtggtggcctaactacggctacactagaagaacagtatttggtatctgcgctctgctgaagccagttaccttcggaaaaagagttggtagctcttgatccggcaaacaaaccaccgctggtagcggtttttttgtttgcaagcagcagattacgcgcagaaaaaaaggatctcaagaagatcctttgatcttttctacggggtctgacgctcagtggaacgaaaactcacgttaagggattttggtcatgagattatcaaaaaggatcttcacctagatccttttaaattaaaaatgaagttttaaatcaatctaaagtatatatgagtaaacttggtctgacagttaccaatgcttaatcagtgaggcacctatctcagcgatctgtctatttcgttcatccatagttgcctgactccccgtcgtgtagataactacgatacgggagggcttaccatctggccccagtgctgcaatgataccgcgagacccacgctcaccggctccagatttatcagcaataaaccagccagccggaagggccgagcgcagaagtggtcctgcaactttatccgcctccatccagtctattaattgttgccgggaagctagagtaagtagttcgccagttaatagtttgcgcaacgttgttgccattgctacaggcatcgtggtgtcacgctcgtcgtttggtatggcttcattcagctccggttcccaacgatcaaggcgagttacatgatcccccatgttgtgcaaaaaagcggttagctccttcggtcctccgatcgttgtcagaagtaagttggccgcagtgttatcactcatggttatggcagcactgcataattctcttactgtcatgccatccgtaagatgcttttctgtgactggtgagtactcaaccaagtcattctgagaatagtgtatgcggcgaccgagttgctcttgcccggcgtcaatacgggataataccgcgccacatagcagaactttaaaagtgctcatcattggaaaacgttcttcggggcgaaaactctcaaggatcttaccgctgttgagatccagttcgatgtaacccactcgtgcacccaactgatcttcagcatcttttactttcaccagcgtttctgggtgagcaaaaacaggaaggcaaaatgccgcaaaaaagggaataagggcgacacggaaatgttgaatactcatactcttcctttttcaatattattgaagcatttatcagggttattgtctcatgagcggatacatatttgaatgtatttagaaaaataaacaaataggggttccgcgcacatttccccgaaaagtgccacctgagggcctatttcccatgattccttcatatttgcatatacgatacaaggctgttagagagataattagaattaatttgactgtaaacacaaagatattagtacaaaatacgtgacgtagaaagtaataatttcttgggtagtttgcagttttaaaattatgttttaaaatggactatcatatgcttaccgtaacttgaaagtatttcgatttcttggctttatatatcttgtggaaaggacgtgagtcgtggctttatgccgttaggcgttgctcaatatattctgttgatttggggtggagagttctgtaggtgagtcgtggctttatgccgttaggcgttgctcaatttttt

SEQ ID NO: 387 - DNA, 3021 bp, Artificial Sequence
  Synthetic
aattctgtggaatgtgtgtcagttagggtgtggaaagtccccaggctccccagcaggcagaagtatgcaaagcatgcatctcaattagtcagcaaccaggtgtggaaagtccccaggctccccagcaggcagaagtatgcaaagcatgcatctcaattagtcagcaaccatagtcccgcccctaactccgcccatcccgcccctaactccgcccagttccgcccattctccgccccatggctgactaattttttttatttatgcagaggccgaggccgcctctgcctctgagctattccagaagtagtgaggaggcttttttggaggcctaggcttttgcaaaaagctaacttgtttattgcagcttataatggttacaaataaagcaatagcatcacaaatttcacaaataaagcatttttttcactgcattctagttgtggtttgtccaaactcatcaatgtatcttatcatgtctgtataccgtcgacctctagctagagcttggcgtaatcatggtcatagctgtttcctgtgtgaaattgttatccgctcacaattccacacaacatacgagccggaagcataaagtgtaaagcctggggtgcctaatgagtgagctaactcacattaattgcgttgcgctcactgcccgctttccagtcgggaaacctgtcgtgccagctgcattaatgaatcggccaacgcgcggggagaggcggtttgcgtattgggcgctcttccgcttcctcgctcactgactcgctgcgctcggtcgttcggctgcggcgagcggtatcagctcactcaaaggcggtaatacggttatccacagaatcaggggataacgcaggaaagaacatgtgagcaaaaggccagcaaaaggccaggaaccgtaaaaaggccgcgttgctggcgtttttccataggctccgcccccctgacgagcatcacaaaaatcgacgctcaagtcagaggtggcgaaacccgacaggactataaagataccaggcgtttccccctggaagctccctcgtgcgctctcctgttccgaccctgccgcttaccggatacctgtccgcctttctcccttcgggaagcgtggcgctttctcatagctcacgctgtaggtatctcagttcggtgtaggtcgttcgctccaagctgggctgtgtgcacgaaccccccgttcagcccgaccgctgcgccttatccggtaactatcgtcttgagtccaacccggtaagacacgacttatcgccactggcagcagccactggtaacaggattagcagagcgaggtatgtaggcggtgctacagagttcttgaagtggtggcctaactacggctacactagaagaacagtatttggtatctgcgctctgctgaagccagttaccttcggaaaaagagttggtagctcttgatccggcaaacaaaccaccgctggtagcggtttttttgtttgcaagcagcagattacgcgcagaaaaaaaggatctcaagaagatcctttgatcttttctacggggtctgacgctcagtggaacgaaaactcacgttaagggattttggtcatgagattatcaaaaaggatcttcacctagatccttttaaattaaaaatgaagttttaaatcaatctaaagtatatatgagtaaacttggtctgacagttaccaatgcttaatcagtgaggcacctatctcagcgatctgtctatttcgttcatccatagttgcctgactccccgtcgtgtagataactacgatacgggagggcttaccatctggccccagtgctgcaatgataccgcgagacccacgctcaccggctccagatttatcagcaataaaccagccagccggaagggccgagcgcagaagtggtcctgcaactttatccgcctccatccagtctattaattgttgccgggaagctagagtaagtagttcgccagttaatagtttgcgcaacgttgttgccattgctacaggcatcgtggtgtcacgctcgtcgtttggtatggcttcattcagctccggttcccaacgatcaaggcgagttacatgatcccccatgttgtgcaaaaaagcggttagctccttcggtcctccgatcgttgtcagaagtaagttggccgcagtgttatcactcatggttatggcagcactgcataattctcttactgtcatgccatccgtaagatgcttttctgtgactggtgagtactcaaccaagtcattctgagaatagtgtatgcggcgaccgagttgctcttgcccggcgtcaatacgggataataccgcgccacatagcagaactttaaaagtgctcatcattggaaaacgttcttcggggcgaaaactctcaaggatcttaccgctgttgagatccagttcgatgtaacccactcgtgcacccaactgatcttcagcatcttttactttcaccagcgtttctgggtgagcaaaaacaggaaggcaaaatgccgcaaaaaagggaataagggcgacacggaaatgttgaatactcatactcttcctttttcaatattattgaagcatttatcagggttattgtctcatgagcggatacatatttgaatgtatttagaaaaataaacaaataggggttccgcgcacatttccccgaaaagtgccacctgagggcctatttcccatgattccttcatatttgcatatacgatacaaggctgttagagagataattagaattaatttgactgtaaacacaaagatattagtacaaaatacgtgacgtagaaagtaataatttcttgggtagtttgcagttttaaaattatgttttaaaatggactatcatatgcttaccgtaacttgaaagtatttcgatttcttggctttatatatcttgtggaaaggacgtgagtcgtggctttatgccgttaggcgttgctcaatggtcaattttggaataggtgtggtgtggtgctgagtgagtcgtggctttatgccgttaggcgttgctcaatttttt

SEQ ID NO: 388 - DNA, 35 bp, Artificial Sequence
  Synthetic
gggaggacatcgatgtcacctccaatgactagggt

SEQ ID NO: 389 - DNA, 35 bp, Artificial Sequence
  Synthetic
ttaacagctgacccaataagtggcagagtgctaag

SEQ ID NO: 390 - DNA, 35 bp, Artificial Sequence
  Synthetic
gaccatcaggaaacattaacgtactgatgttaaca

SEQ ID NO: 391 - DNA, 35 bp, Artificial Sequence
  Synthetic
ttaaaaacacaacatcagtgcatgttggggattcc

SEQ ID NO: 392 - DNA, 35 bp, Artificial Sequence
  Synthetic
cggaaggatcccacaatcactctcagaatgttctc

SEQ ID NO: 393 - DNA, 35 bp, Artificial Sequence
  Synthetic
tgactagagagggtccattttgaggatgggggtgt

SEQ ID NO: 394 - DNA, 35 bp, Artificial Sequence
  Synthetic
cccatgccttgctctctttctgtcctcagtggtcc

SEQ ID NO: 395 - DNA, 35 bp, Artificial Sequence
  Synthetic
tatattctgttgatttggggtggagagttctgtag

SEQ ID NO: 396 - DNA, 35 bp, Artificial Sequence
  Synthetic
tggtcaattttggaataggtgtggtgtggtgctga

SEQ ID NO: 397 - protein, 272 aa, Planktothrix sp.
MARSKQDWTQAKFERYLKEGRGQGSGKGYQPWIKIQDFPSKGRVSRPPGWKTNREHHLLSDNEKRLFYVFEWSDTIVDIREQFPLIDLDLAMSIAEEIGINYPKDPESNTARVLTTDFMLSVKQGKKIVQKARTFKLTKDLGSKSVAEKFELEKRYYAAKGIDWGIITEKEVPKQLAENVEWVHTAYKLEENADINLEELRDIANILKSRLQESDANINRITTDLDKNMNIESGTSLYLFRHLIAKKEIIMDMLATKISSCPSSGAIKKIIL

SEQ ID NO: 398 - protein, 745 aa, Planktothrix sp.
MSNDLFVNDLIEWIDESGNSFIERVLWIDEGYIIAFVFNINTKTGFPEPKKVSEIVEAISNGSALKLKSDPWARIVTEEDLSEKEKELRDRAWEIISFIVIQEPSIYYRDYRGALVQQTIEKYNTGRSKGKLVEISVYKYLRRFWQRGKNKNALLPDYVNSGGKGKPKASGEKKRGRPRKYVHDQEIGIGINVTEEDRKIFRFAIAKFYNNSKENFLTTAYDLMIKEYYSEDFYYDENGVKKSILIPPDKRPTFTQFKYWYEVEQSDIRKTIISRKGSIKYALEHRAITGTSQMETIGPGSRYQIDATIADVYLISMYNRNWIIGRPVIYVIIDVFSRMITGVYVGLEGPSWAGAMMALANSATDKVKFCQEYGVEISGDEWPCRHIPDTILGDRGELVGMKVETLIPNLDVRIENAAPYRADWKGLVERQFRTIHGYVKPFVPGYIDTDFRQRGGHDYRLDGRLNIDEFTKIVIFLILQHNNHDYLTKYARDEMMITDDVNPIPRELWQWGIANRSGRLRTFPEDIVKLNLMPAEKATITARGIKFKGMYYTCEKARKEFWFEKSRSSLLSKSEKSLDISYDIRQSKYIYLRSPNGRDFEKCFLLESEQRYLDKNLYDIEYLFAYEELQRQKHQGKRLQEKVDLIANIESIVSKAKEDTEAVLDDNTSNRQKVAGIRENRAFEKDRRRKNEGFELAKEEITNSTEATNNKVNTQSEDLESSKLLKPDHMDLLRRKRQERKRGED

SEQ ID NO: 399 - protein, 555 aa, Planktothrix sp.
VEKIEGELVMIPNGKSAIVARYIDQKLPEYNTNPLIQALPPILSSEEFIDKVTRTPDFDEQERQLEAHYRFHCIERLSRYFDPQNKTVELQKVINVLIMTGYLARNILTPDYANRSRQIYNAIKDGGGKNLQSYVNLPTSASGLTLIGPSGMGKSTNLHNILNLYPQVILHPNYSVYQIVWLKVDCPKTLKGLCTDIFMTIDQLLGTTLFNKFNSSRSSEDYLLAQLAQIAHTHHLGVVVIDEIQNLVTTRRSRDEILNFLVKLDNIIGIPVIRVGTNEAISILQGNFRNARRNTGEGSVIWDRMINDDEWCFFLEGMWEYKWTKTPVFLSDEIKEVFYEESQGIIDIAVKLYKMLQWRAISIGGKEIITTELLRKVAKDGLYLVKPMLDAIRSGDKEWMIKYKDIAPLDTTEYQNKCRSELESKDLQEIRRLARKQQTYQKVSPKLNYVILELLKLEVEPAKAKECAEQVIVSSDEDADITLLTKKAYTLALQGGQVNESLVKANISKAKLKPKYQGNDIRGIVENAKKEKKFAYDDLKLAGIIKNPVEDFINI

SEQ ID NO: 400 - protein, 316 aa, Planktothrix sp.
MLSFFPTLYPDELLYSSLARYHIRSGNKSFKQTDLELFGYSSQQVCKVTLTNNVNYLVKNFPLRSQQTVDNLLQNHTLYPFYATFLMPQEAWLLKDSMSKKLSGSILEIAKVATGSSGESKNFLKFCPGCLEKDTQQYGEPYWHRTHQVPGILVCPTHGVVLWDSCVALESKGIHYYAASVYNCLVITDVKSFTNQALRTLLTLTSDINLLIHSNFTFKGLAWLRTQYQRYLVNKGLLQIFPGGKLKFDEYAFSKLIFDFYGQESLEALNPKLTQHQGKYFSHCLLGCDLNPAVDRITHILMVKFLANSIEAFFQE

SEQ ID NO: 401 - protein, 633 aa, Planktothrix sp.
MLGFFPAPYPDEILYSILARYHIRSGNTSPKITLRELFNSQDVIATVDLPSNLNSLIENLQFISNYQVEDLIYKYTLYPFYSIFLPQKRASQVMDSMKADFGGDIHTRTGIMASSLKMQRYLQFCPKCLEEDLQNYGESYWHRLHQTPGVLVCPLHGVTLQDSTIFMQGFNRHEYYATSLENCPVVPIQQTYSQETLKKLLLLAQDISWLITNNLFSRELEWFQKKYIALLIEKDFATATGRVNQKRLLDNFLFFYGAEVLEAVNSMVNYENEQNWLFSIVRKHRKSFHPIRHLLVIRFLTNSIEEFFNTDYQYKPFGEGSWLCLNAAVDHYLKPVITNLVVTHCLDNKKPLGTFSCSCGMVYCRTGPDETDEDKQRIGKVLTYGQFWEQKLKELVEIQKLGLRETARQLKVDSRTVKRYTAILKLKTFWKSSEKNLLVDSQEVLNLNLNLASDDRIKYRELWKALQQQYPEASKTTLRGLAKGTYIWLYRNDKEWLNKNSPSLKVPLPCVGKVDWAERDKQVLEKVKTAVRTFLSAEKPARVTICRIGKSIGLLALLEKHLAEMPLTKVYLESVTETVEDFQIRRIKWAIKQLDDCGEEIQPWKVIRLAALRENCSQRVQAALENELYKQPN

SEQ ID NO: 402 - protein, 233 aa, Planktothrix sp.
MVVDCSLPTQILSESPLNLTKPTEVLTPHLPYIDLIFNLIGETVPLDHGYELFSAIAHFEPELHKLNTVGINTIAGIPKEGVIQLTKNSRLRIRLPVDQVRLVYPLAGKSLKIGKHTIRLGIPEIYLLEPAERLRSRIVIIQSYQEPESFLAAAQRQLEKLGIQGKAFITKNTDGSPKRRSIKIKRFTVVGFGLEIINLSDEDSLTLLRYGIGGKRKMGCGVFVPVKRKGNAS

SEQ ID NO: 403 - protein, 511 aa, Planktothrix sp.
MSVVASVVNPKIQLNLGDPSITWIHRAGIAGLWMTLKQLEKLYPIPAERPGNLTWFLTHRSISLEWQGQDFVVLDWLLKQSFQINEEGLISLTGLNTHSINIETRINIHLGITGTFLQHNQVFKFDGGKSWSLIVDGIEIDVEYKKAVSYAHQHFAKQLCDKQGQLLGQSIGVAGWLYPGSVVRHVAFTKETRFEEKPQLAFALLYAPVACHYFVLRSHTKPEHTQYALVIPEVVDLEIYAQEYWNLENLDYKDFNVSSLGDAALRYLTYETIIELAIPDQVKRCQVILFGTVVWSKQQKTRIEIAVVEATGIINFIYKLSGISFPEYQIIQYKNKNFIISNLFRGTIADNLVKGFPWWANLYTIFKNKSLFKFITNDGAYKMIQNSEWNLESQKLFIKACHEALKKIYAKIYGRTNEGQYAQIERENIRILSQLGRCTNAENFRKFIAEFWGRAGQLSILEKHWEELLPLTSGIMDWKVARDLTFIALASYPKSNMVEKQILEIPDSNSE

SEQ ID NO: 404 - protein, 324 aa, Planktothrix sp.
MFHLFGNILTSYGTAANNRGENEGNITPLQKLNWKGEVHTLVSSEAIRWALRYYWQNVGYPVNRRWDENAQPVADHVWQDPNFDDIRFIDDDVLGFMQAEAAKAEASDESEGEAEEASQNENKKISKGKDKQTSPRKGKQKPKGKITARRGVLEVTRAVSMIPFTGDITFNAVSGVKGRNSLYATEIHATRYQYGFALTPDSLKDKSRIHAVLDGLISIGEVAGNHARFLYDFSPESIVLRWTDDFSPRFLYCFEQDELGNLSVSNLVRQVEVGDIDPKELWIGGLISQGLEDLGANVFPGVKSAVKALKQVIAEDLQLSSGSD

SEQ ID NO: 405 - protein, 208 aa, Planktothrix sp.
MMTIALKVEVPIACFRQSRAREYAETYPVPPPSTVYGMLLSLIGETDRYKHCGTQLAIALLSKPEKSIVIRTFRRFKTKDIHHPKNAKPDYQELLTNIEFVVWVKTDKAKPTLPELLQQAFANPASINRFGGLCLGESRDLVNTVTLLPENYHGESLWWLVTDEDGSLTLPYWVDHVGSKRTRWQCYELQESQVWQPPDLSWTTIQTS

SEQ ID NO: 406 - DNA, 117 bp, Planktothrix sp.
gtcgagtaaaaaaatacaaataattcagtaatatgtataacaataataaagtcgtataacaaataaaaaagttatacaatacataaaaaagttatacactttatcctgtaggcgcgt

SEQ ID NO: 407 - DNA, 387 bp, Planktothrix sp.
gctttgtacttggaatgcgatcgccactaaatcttggaacaaatattcccaaatccttacacggaagtaggttgcaaaactatacaacttttttatttgtttttagatagtagcataataaaattgtataactttattttttcaaaaattctcagtgcctaacgatagaatagtgtttgtagccgcgcaaattgtacaacttttttagttgtttacataatattgtggaggaataaaaaagttgtactatttttcctatgggtgtatctaccaagcatccataggagaaccttttgttgatgagactaataaaattatatgcggcgtgattctattttttatttattttaaaaataaccgaagctagtgtttaagttactgaaaaat

SEQ ID NO: 408 - DNA, 309 bp, Planktothrix sp.
gatgtcgtcagacgttgagcagtcgaatacttcgatggagcggaggagctatcagcgcttctttaacattggatgtcggcagacgttgagcagagattgcgttcaccatcaaagaacaagccaattggagttctttaacattagatgtcgtcagacgttgagcaggttggtgttccagcgattgactataccgagatgcaagttctttaacattagatgtcgtcagacgttgagcagactcaagctcaagcaagtaggttatgggcgatagtagttgtttaacattggatgtcgtcagacgttaagcaa

SEQ ID NO: 409 - protein, 272 aa, Anabaena sp.
MARSKQDWTQAKFERYCKEGRGQGSGKNYQPWIKIQDFPSKGRVSRPPGWKTNREHHLFSDNEKRLFYVFEWSDAIVDIREQFPLLDLDLAINIADEMGINYPKDPQSNTPYVLATDFMLSVQQGKNIVQKARTFKLTKDLGSKSVAEKFELEKRYFAAKGIDWGIITEKEVPKQLAENVEWIHTAYKLEENADINLEELRNIANILKFRLQESDASINKITTVLDKEMNIESGTSLYLFRHLIARKEIIMDMLVNKISSCPSSKEIQKIIF

SEQ ID NO: 410 - protein, 743 aa, Anabaena sp.
MINDLFVNDLIEWIDESGNNFIERVLWIDEGYIIAFVYDINAKTGFPEAKKVSEIREAISDGRALKLKSDPWARIVRDEDLSEKEKELRDRAWQIISFIVTQEPSIYYRDYRGTLVQQVIEKYNAGRTEGELVPITVYKYLRRFWQRGKNKNALLPDYANSGGKGKPKSSGDKKRGRPRKYAQVPEIGVGRNVTEEDKRIFRFATAKFYNNSKENFLTTAYDLMIKEYYAEDFYYDDNGVKKSILIPPDKRPTFTQFKYWYEVEQTDIRKTMISRKGSRKYALENRAITGTSQMETIGPGSRYQIDATIADVYLVSLYNRNWIIGRPVIYVVIDVFSRMITGVYIGLEGPSWTGAMMALANAATEKVKFCREYGIEISEDEWPCKHIPDTILGDRGELAGMTVETLIPNLNVRIENTAPYRADWKGLVERQFRIIHGYVKPFVPGYIDTDFRQRGGHDYRLDGRLNIDEFTKIVIFLILQHNNHDYLIDYARDEMMITDDVNPIPRELWQWGIANRSGRLRTFPEDIVKLNLMPTEKATITARGIKFKGMYYTCEKARKEFWFEKSRSSLLSKSEKSLNISYDIRQPNFIYLRSPNGREFEKGWLLESQQRYLDKNFYDIDYLLAYEKLQNQKHQGTRLQAKADLIANIESIVSQAKEETEAVLDDTISNRQKVSGIRQNRADEKNARRKNEAFELAKAETPNTDNTKNLINTQSEDSEDSKLLQPDHMDLLKRKRQERKRGK

SEQ ID NO: 411 - protein, 557 aa, Anabaena sp.
VESNEEEVVSIPNGKSAVIARYIDQKLPEYNANPLIQALPPILSAEEFIDKVTRTPDFDEQERELEAHYRFHCIERLSRYFDPQNKTVELQKVICALIMTGYLARNILKPEYASRSRQIYNAIKDGGGKNLENYVNLPTSASGLTLIGPSGMGKSTNFQNILNLYTQVILHPEYSVYQIVWLKVDCPHAGSLKGLCTDIFLAVDRLLGTNYFKKFGSSRNSEDYMLAQVAQIAHTHHLGVLVIDEMQNLVTARRRSSDMLNFLVKMDNTVGIPVIRVGTNEAFPILQGNFRNARRGTGEGSVIWDRMVNDDEWYFFMEGMWEYQWTKTPVPFSDEINEVFYDESQGIIDIAVKLYKMVQWRAISIGGKEIITIELIRQAAKDGLYLVKPMLDAIRSGDKEWMIKYKDIAPLDTTEYQNKCLSELDSKDLKEIRRLARKQQNQQKVSPKLNYVILELLNLEVEPAKAKECAEQVIVSSDEDAEIPSLVKKAYALALQGGQVNESLTKTNTKKAKLKPNYQENDIRRIVENANKEKKSAYEDLKLAGIIKNPVEDFINI

SEQ ID NO: 412 - protein, 315 aa, Anabaena sp.
MLSFFPTLYPDELLYSTLARYHIRSGNKSFKQTDLELFGYSSQQVCKITLTNNLNYLVKNLPLRSQQKVENLLQNHTLYPFYATFLMPQEAWLLKNSISKKLSGSILDVAKVATNSIGDSKKFLKFCPECLEKDTQKYGEPYWHRIHQVPGILVCPTHGIVLQDSCVKVESKGVHYHAASVDNCLVACKVKNLTNNTVKTLFTLVNDINWLIHSNFAFQGLAWLRAQYQRYLVDKGLLQTFPGGKFKFDEYGFAQLIFEFYGQESLEAINPKLTQHQGKYFSHCLFGCDLSPAIDRITHILLIKFLANSIEEFFQ

SEQ ID NO: 413 - protein, 636 aa, Anabaena sp.
MVSFFPKPYPDEILYSVIARYHIRSGNTSPKITLQELFNSQTTVATVDLPSNLNNLIQNLQFISNYQVEDLIYKHTLYPLYSPFLPANRSSQVLESMKGDYGGDIHTRAGIMASSITMPKYFRFCPTCWEEDLKNYGEPYWHRIHQIPGVLVCPFHDEVLQDSLAPLHGFNKHEYYAASTDKCSITKEPSIFSPDTLKKLLVLAKDFWWLLNSEIPCQEPQWFRKQYTNLMIEQGLATATGRIYQKKLLDNFLFFYGREMLSAVNSIVTHNDSSNWVTSIVRKHRKSFHPLRHLLMMRFLKTSVEEFFKQDNKYKPFGEPPWLCLNAAAEHYLQPVITNLVITLCCDTKKPVGTFSCTCGMVYCRTGPDETDDDKLRIGKVKAFGQLWEQKLKEFVEVEKLGLRETARRLNVDPGTIKRYVSLLKLTTYWQTRKENGSVDLQEVAEIHPNSATELKLKHRQDWMALQAQNPDASKTTLRKLAPATYIWLYRNDREWLNQNSPALQVAVPSVVRVDWQERDRQILAQAQDAVRSLINADTPERISISRVGKTIGLLALLEKHLDQMPLTKAYLESVVETVEDFQMRRIKWAIKLLDECGEEIMRWKVVRVAALREDCSERVNAFLENELDKAYKKER

SEQ ID NO: 414 - protein, 227 aa, Anabaena sp.
MIVDGNLLRQIPSESPPKPRELLMSQLPYMDLTFNLIGETLPFDHGYELFSAIAHFEPKLHTLDTLGIHTIAGIPKDGVINLTQNSRLRVRIPVNQVHLVYPLAGKSLRIGKHTIRLGIPDICLLQPAEQLRSRIVVIRGHEEPETFLVVAQRQLEQLGIQATASIPTKANGKPIRKTIKIKRFTVVGFGLEVTNLSNEDSLTLQIHGVGGKQKMGCGLFMPIQERQ

SEQ ID NO: 415 - protein, 498 aa, Anabaena sp.
MKTAANPKIQLNLGDPSMTLLHRAGVAGLWMTLKKLEKIYPTAAQRIGNFTWLLTPSNISLYWEGQDFTVLDWLLKHSFQISDEGLISLTGLDSQNMDIQTQIIIHQGITATFIQHNKFFKSAGQQSKQLIIDGIQLRVDYKKAASYAHQHFAKHLCDQYGQLLQEPIGIRGWLYPGAVVRHYAFKEQTAFEEKAEYALALLFAPVACQYFVLRSHTEPSHTNYVLVVPEVIDLELYAQYLWYLSKLDYKHFHVSSLGDAGLKFITYEAKQLDNFNFIKRCQVISFSTKAWSERQKTRAEIAIIELNSSVSYLYKLSCICFPNCQVVIYKNQHFLLPSLMKGIIANNLAMGWPWWANWISVIKNNKSFKQFTDEYIGINKMIQDSEWDIEAQKLFIQACHEALRKIYAKIYSRMKEGGYAQIERENTRILSQLKRCTNADNFRKFIAEFWGRAGQMTILEEHWVELLPLTTGIGNWKVARDLTFIAMASYPKNKITEV

SEQ ID NO: 416 - protein, 324 aa, Anabaena sp.
MFHLFGNILTTYGTAANNRGENEGNTTTLQKLIWKGEVHSTVSSEAIRWALRYHWQNAGYPVNRRWDENAQPVADHIWEDPNFDDIRFIDDDVLGFMQAEAAKVEAADESEVEIQNSTQDENQTTSQGEEKKTSQRKRKQRPKGRISARRGVLEVTRAVSTIPYAGDITFNSMSGKKGRTSLYATEVHATRYQYGFALTPNRLKDKSRIHAVLDGLISIGDVAGNHARFFYDFSPDSIILRWTHDFSPRLLYCFEEDELRNISTPDLVRRVEAGDIDPKELWIGGAIASTLENLGANLFPGVKATVEALKQVIIEDLQLSLRSS

SEQ ID NO: 417 - protein, 210 aa, Anabaena sp.
MTTIVVKVEVPIACFRQSHAREYAETYPVPPPSTVYGMLLSLVGEVDRYKHCGVKLAIALLSKPEKSTVIRTCHRFKTKNIHESKNNKPDYQDLLTNIEFVVWVDAGADKAKPNLAQRLEEAFTNPASINRFGGLCLGESRDLVNDVSLLPENYYAESMRWLIRDDYGLLTLPYWVDHVGSRGTRWLCYEIQEFQVFQPPELSWTSIQSD

SEQ ID NO: 418 - DNA, 130 bp, Anabaena sp.
tcggtaactgtggagtaaaataatactttaaataagtataattgtacaacaataaaaaagtcgtataacaaataaaaaagttgtacaatatataaaaaagttgtacaatatatcctgtgggtgcatatgc

SEQ ID NO: 419 - DNA, 490 bp, Anabaena sp.
tgacattctcaaaactaaattagttattaacccaagttgctagttatgccgaagagcgatcgcagtgggttccattgccgcttcagaatggatagttaacatatactctcaaggcgactgtatttactgcttccctgcgtggcgtagccattcctgttacttaatgtttccggttttagtcgatactattaccatagcagcaatagagggattactgattaagcttgctctggagagcgatcgcaagttattttggaacaaatagatgccaaatccttacagggcttgctttcggcaaattatatgacttttttatttatcaatatgaggcatttctgaaaaattgtacaactttattttttgatatcaaataaaattgaacgtaaatacaaggcttataaactttcaaattatataagttttttatgtttttacaataatttggtagaataaccagataatttctgaatgtgatgataatattatcaca

SEQ ID NO: 420 - DNA, 322 bp, Anabaena sp.
gtgctttaacattagatgtcgttaggcgttgagcagtgattaacctgaaggcttgctccgggatgttgtaggtgctttaacattagatgtcgttaggcgttgagcagcaccggtaccgcgagtagtcgcaccaatattcatatgtgctttaacattagatgtcgttaggcgttgagcagttgaatgcgaagttatcggcagatgttttgttgttgtgctttaacattagatgtcgttagacgttgagcagtgaccattggtgtatccatcaatcctgactgctgcgtgctttaacattagatgtcgttaggcgttatctact

SEQ ID NO: 421 - protein, 272 aa, Nostoc sp.
MVRGRREWTQAKYERYIKEGRGRGSGKDYKPWLTIQDFPSKGRSSRTPGWKTNRVHHFFSDHEKRLFYLFEWSDIVTDIREQFPLDNLDLAMSIATDIGIKYPIDTQSGTPHVLTSDFMLTVNHNGKRTQIARTVKQSTELEKKRVNEKLEVERRYYLAIGIDWGIITEKEISRLLAENVEWIHSAYRLEANSEMDTVQLRELSKILKSKLQEEDATINKITIALDEEMNINYGTSLYVFKHLIARKELIVDLVKIKLSACPSAKVIEKIIF

SEQ ID NO: 422 - protein, 742 aa, Nostoc sp.
MAQDLFVNDLIEWMLDSKTHVIERIVWIDEGYIIAFVIDINAKKGLPEAKKISDICDAISEGIAFKQQRDPWARIIRDENLTDREKEYRDKAWEIISSLVTEEPLIYYRNFRGSLVKQVVEKYNLEKNKDKLVEKTVYGYLRRFWQRGKNINALIPDFINSSGKGKIRGQSSKKRGRPKKYAHDPDIGEGVNVTEEDRMIFRIAISKFYNNPKQNYLTTAYDLMVKNYYKEGIRYDENGVQKSILTPTDKIPTITQFKYWYQLEQDDVTKTLTSRKGAKRVALENRAILGTSKMETIGPGSRYQIDATVADVYLVSKYNRNWIIGRPVIYVIIDVFSRIIAGVYVGLEGPSWTGAMMALANVATDKTLFCKEYNINITEDEWPCNQMPDAILGDRGELAGMTVETLIPNLYVRIENAASYRADWKGLVERHFRIIHEYVKPFLPGYVDTDFRQRGARDYRLDGKLDIDQFTEIIVHLIVHHNNKPLKEYERDEAMIADDIPPIPTELWKWGITNRSGRLRTFSEDIVKLNLMPTEKAIITAKGIKMRGKEMYYTCDSAEKGQWFEKARSNLLSKSDKSLIVSYDIRNLNFIYLPSSDGRDFEKCFIIDSEGRYANKNFYDIEYLLAYEELQRQKNQGKQLQEKVDLIAEIESIVDRAEKMTNAAQEPNLSKTKKLSGIRENRAFEKAKRRENERFELANTENKNSFQAVESNLETSEQPESLQPNHLDILRKNRQERKLGQE

SEQ ID NO: 423 - protein, 555 aa, Nostoc sp.
MDRNEGELIRIPNGKLAVVARYIDQKLPEYNANPLIQALPPILSAKEFLNKVTITPEFHEQERELEAHYRFHCIERLSRYFDPQNKTVELQKVICTLIMKGYLARNLLKPEYASRSRQIYHAMEDGGGKNLEKYVNLPTSASGLTLIGPSGMGKSTNFQNILNLYDQVIFHPDYSVYQIVWLKVDCPKTLKGLCTDIFTEIDKLLGSKLFNKFSSSRSSEDYLLAQLAQIAHTHHLGVLVIDEIQNLVTTKRSRDEILNFLVKLDNIIGIPVIRIGTNEAISILQSNFRNARRSTGEGSVIWDRMLNNDEWCFFMEGMWEYQWTKTPVPFSEQLKEIFYYESQGIIDIAVKLYKMVQWRAISIGGGEVITIDLIRQAAKDGLYFVKPMLDAIRSGDKEWMIKYKDIAPLDTTEYQNKCLSGLDYNDLKEIQRLARKQQNQQKVSPKLNWIIARLLELEVEASRAKECAEQVIVINDENADIATLVNKAYALALQGGQVNTNLVKTSQKKAKLKTKYIENDILCAVENAQKEKKSAYEGLKLAGIIKNPVEDFINI

SEQ ID NO: 424 - protein, 315 aa, Nostoc sp.
MLSFFPALYPDELLYSTLARYHIRSGNKSFKQTDLELFGYSSQQVCKITLTNNLNYLVINLPLGSQQTVDNLLQNHTLYPFYATFLMPQEAWLLKNSMSKKLSGSILDIVKVATNFSGDSKKFLKFCPECLEKDTQKYGEPYWHRIHQVPGILVCPTHSVVLHDSSVGVESKGIYYHAASMDNCLLPSKVKIFTNKTLQTLFILANEINWLIHSNFTFRGLAWLRAQYQYYLVHKGLLQTFPGGKFKFDEFGFTQLIFEFYGQEFLEALNPKLTQHQGKYFSYCLFGCDLNPAIDRITHILMIKVLANSIEVFFQ

SEQ ID NO: 425 - protein, 635 aa, Nostoc sp.
MLGFFPAPYPDEILYSILARYHIRSGNTSPKITLRELFNSQDVIATVDLPSNLNSLIENLKFISNYQVEDLIYKYTLYPFYSVFLPPKRATQVMESMKADFGGDIHSRAGIMASSLKMQRYLRFCPKCLEEDLQKYGESYWHRLHQTPGVLVCPVHCVTLQDSTIPIQGFNRHEYHAASQENCPVVSVQQIYSQQSLKKLRVLAQDILWLINSNLLSRELEWFQRKYIALLIEKGFATATRRVNQKRLLDNFLFFYGAEILEAVNSMVNYKNEQNWLFSIFRKHRKSFHPIRHLLVIRFLTNSIEEFFNTDYQYKPFGEGPWLCFNAAVDHYLKPVITNLVVTHCLDNKKPLGTFSCFCGMVYCRTGPDETDEDNLRIGKVNTYGQFWEQKLKELVEIQKLGLRETARQLKVDPRTVKRYTAILKLKTFWKSSQKNQLVNSQEILDSNLNLANDNKIKYREVWKTLQQKYPEASKTTLRRLAQGTYAWLYRNDKEWLNKNSPVLKVPLACVGKVDWAERDKQVLKKVKNAVRALLSAEKQKPTRISIGRIGRTIGLAALLEKHLAEMPLTRDYLESVKESVEDFQIRRIKWAIQRLDDCGEEIQPWKVIKLAALRENCSERVQAVLESELYKQPD

SEQ ID NO: 426 - protein, 233 aa, Nostoc sp.
MIVDCSLPTQITSESPLKLTESRELLTSQLLYIDLIFNLIGQTVPLDHGYELFSAIAHFEPKLHKLDTVGIHTIAGIPKEGVIQLTKNSRLRIRLPVEQVGLVYPLAGKQLRIGKHTIRLGIPEIYLLEPAERLRSRIVIIQGYQEPESFLAAAQRQLEQLGIQAKAFITKNTDGSPKRRSIKIKRFTVVGFGLEIINLSNEDSLTLLRHGIGGKRKMGCGVFLPVKRKENAT

SEQ ID NO: 427 - protein, 510 aa, Nostoc sp.
MSVLASVVNPKIQLNLGDPSITWIHRAGIAGLWMTLKQLEKLYPIAAERPGNLTWLLAPRSISLEWQGQDFIVLDWLLKQSFQINEDGLISLTGLNRHSINIETQINIHLGITATFLQHNQVFKFDGEKSWPLIVDGMEIDVEYKKVVSYAHQHFAKQLCDKQGQLLEQPIGVAGWLYPGSVVRHVAFTKETKFEEKPELAFALLYAPVSCHYFVLRSPTQLQHPQYVLVIPEVTNLEVYAQQYWSLGNLDYKYSHVSSLGDAALRFLTYKTVAIPNQVKRCQVILFGTVAWSKQQKTRTEIAVVKVTEIIDIVYKLSCISFSEYKIINYKNKNFIISNMLKGIIADNLIKGFLWWNDLYIKIINFNLSKLILYENRGIYNMIEHSKWDIEAQKLFIRACHEALKKIYAKIYDRTKEGQYAQIERENIRILSQLGRCTNVENFRKFIAEFWGRAGQLSILEEHWEELLPLTSGIMDWKVARDLTFIAIASYPKSKQINTKNLEKAQLGNE

SEQ ID NO: 428 - protein, 324 aa, Nostoc sp.
MFHLFGNILTNYGTAANNRGENQGNITTLQKLIWKGEVHTTISSEAIRWALRYYWQNVGYPVNRRWDENTQPIADHLWQDLNFDAIRFIDDDVLGFMQAEGAKVEASDEPEGGTEEPSQDENKKSSKGKNKQTSQSKGKQKPKGKITARRGVLEVTRAVSIIPFTGDITFNAVSGVKGRNSLYATEIHATRYQYGFALTPDSLKDKSRIYPVLDGLISIGEVAGNHARFLYDFSPESIVLRWTHDFSPRFLYCFEQDDLGNLSVSNLVRQIEVGDIDPKELWIGGLISQGLEDLGANVFPGVKSAVKALKQVIAEDLQLSSGSN

SEQ ID NO: 429 - protein, 208 aa, Nostoc sp.
VTTIALKVEVPIACFRQSRAREYAETYPVPPPSTVYGMLLSLIGETDRYKHCGTQLAIALLSKPEKSIVIRTFHRFKTKDIHDPKNAKPDYQELLTNIEFVVWVKTDKAKPTLAERLQQAFTNPTSINRFGGLCLGESRDLVNSVTLLPENYHAELLWWLVTDEDGWLTLPYWVDHVGSRRTRWQCYELQESQVWQPPDLSWTTIQTS

SEQ ID NO: 430 - DNA, 149 bp, Nostoc sp.
atttatactactaaagcagtaattgttgtggaggaataattcggttgaacaataaataattcgattcaacaatttataaaacgattgaacaatagcctctaagggagtatgattgtaccaagtaaaggtgcgatcgcttctagaggtta

SEQ ID NO: 431 - DNA, 327 bp, Nostoc sp.
gttctttaacattagatgtcgtaagacgttgagcaggaaatcaacggcgctgatggggttgtcttgatgcagttgagttctttaacattagatgtcgtaagacgttgagcagactcttgtgtgtccgtcgcattctgttggagagttgttctttaacattagatgtcgtaagacgttgagcaggttggagtgccgacaattgactttaatcaaatgcagttctttaacattagatgtcgtaagacgttgagcaggtaagaaattcccgctgttgcttcgctattggctagggttctttaacattagacttgttgggaaataatatga

SEQ ID NO: 432 - protein, 272 aa, Planktothrix sp.
MVRGRGEWTQAKFERYRKEGRGRGSGKDYKPWITIQDFPSKGRSSRTPGWKSNRVHHFLSDQEKRLFYLFEWSDVVTDTREQFPLDDLDLAMSIATEMGIKYPVDLQSGTPYVLTTDFMLTVNQNGKQVQIARTVKQSTELEKKRVIEKLELERRYYLAKSIDWGIVTENEIPRLLAENVEWVHSAYKLEANSEMDIAQLHELGTILKSKLQEHDTAINRVTTALDKEMNIKSGTSLYMFKHLIAAKKIIIEMLETKISAYPSSKVIEKIIF

SEQ ID NO: 433 - protein, 743 aa, Planktothrix sp.
MHENLFINDLIEWESDGNSQLIERIIWIDEGYIIAFVLDINSKKGLPEPKKVSEILEAMSEGLAFKQKKDPWSRIIREENLTDRDKEYRDKAWEIISSLVVQEPSIYYRNIRGSLVRQVIKSYNEGREKDKLVERTVYGYMRRFWQRGKTKNALIPDFINSSGKGKIRGDSNKKRGRPKKYSYDPEIGEGVNVTEEDRRIFRIAISRFYNNPKENYFTTAYELMVKEFYKEGIRYDENGVRKSILTPTEKIPTITQFKYWYQIEQYDVTKTLTSRIGAKRFALENRAILGTSKMETIGPGSRYQIDATVGDVYLVSKYNRNWIIGRPVIYVIIDVFSRMITGFYVGLEGPSWIGAMMALTNVAADKVMLCQEYNIDIAEEQWSCNQMPDAILGDRGELAGMAVEPLIPNLYVRIENAASYRADWKGLVERHFRIIHEYVKPFLPGYVDTDFRQRGARDYRLDSKLDIDQFAEIIIRLIIFHNNKPLNEYERDEAMIADDVPPIPRELWKWGIANRSGRLRSFPEDIVKLNLMPTEKATITAKGIKLRGKDMYYSCDQAQKEQWFEKARSNMLSKSEKSLIVSYDIRNPNFIYLPLEDGRNFKKCYLIDPEGRYINKNFYDIEYMLAYEELQQQKTQGKTLQEKVDLIADIEHIVSKAENMTEAAQDEPLSKSKKVAGIRENRAFEKAKRRENEGFELAKTETPTSTEAVETNNESLKLPKSLQPNHLDILKQKRLERKRGRKE

SEQ ID NO: 434 - protein, 555 aa, Planktothrix sp.
VDGKNEREWVEIPNGDWAAIAKYSDHKLPEYNINPLVQALPPILSRDEFLERVTEVPDYDSVETELEPQYRFHCIERLSRYFDPQNKTIELQKVIAVLIMQGYIARNILKPEYTRRSRQIYDAIKDGGGKTLENYVYVPTSASGLTLIGPSGMGKSTNLLNILSLYPQVILHPEYTTFQIVWLKVDCPRSLKGLCTDIFLAVDRLLGTSYFKKFGSRGNSEDYMLAQVAQIAHTHHLGVLVIDEMQNLVNARRNRDDLLNFLVKMDNTIGVPVIRVGTNEAFPILQGNFRNARRGTGQGSVIWERMLQNDDWDFFLTGIWEYQWTKTPVDFSDEINEAFYYECQGIIDIAIKLYKMIQWRAISLGGDEKITVDLIHQSAKDGLYLVKPMLDAIRSGDQDWMIKYKDIAPIDAIEYKNKCLSELESRDLEEVRRLARKQQSRGNQSVKLRHIIIELVKLDVEPSVAKECAEKVLAINEDNADIPSLVKEAYIYALQGEPVKKGTAKTNIRKTKPKYQSNDIRQIVENAKNKKIPAYQDLKAADIIKNPLQDFINIE

SEQ ID NO: 435 - protein, 315 aa, Planktothrix sp.
MLSFFPQLYPDELLYSGLARYHIRSGNTSFRQTEIELFGYYSQQICRVILPSNLNYLVNNLPLRSKQTVENIIQNHSLYPFYATFLIPQEAWVVRESMKKKLNGSILEMAKVAFNSTDRAKKFLKFCPICMEEDTQKFGEGYWHRFHQIPGVMVCSVHNSALYDSSVIVETRNTHYHAASPDNCILNTNTRKYTEETLRNLIVLAREVEWLISNNMDFKGLAWLRSQYKHYLVNKKLITLFPGSKFIFKEKDFSKSIFQFYGKDFFETINQNCIKNPDKYFSNCLLACDINPVIDRIIHILIINFLANSLENFFR

SEQ ID NO: 436 - protein, 246 aa, Planktothrix sp.
VCLVQQDMVKEMSSYFSLPTQTPITETLTQTYPKETLTPKLPWVELRFSIIGQTIPVDHGYGLYSAIAHFQSQVHDMDNTLGIHTIAGIPSEDGQIHLTDNSRLQIRLPVDKISLIYPLAGKSLKIGKHTIRLGIPEIYLLEPAERLRSRIVIIQGYQEPELFLAAAQRQLEKLGIQRKAFITKNTDGSPKRRSIKIKHFTVVGFGLEIINLSDEDSLTLLRYGIGGKRKMGCGVFVPVKRKGNAS

SEQ ID NO: 437 - protein, 511 aa, Planktothrix sp.
MSVVASVVNPKIQLNLSDPSITWIHRAGIAGLWMTLKQLEKLYPIPAERPGNLTWLLTPRSISLEWQGQDFVVLDWLLKQSFQINEEGLISLTGLNTHSINIETQIYIHLGITGTFLQHNQVFKFDRGKSWSLIVDGIEIDVEYKKAVSYAHQHFAKQLCDKQGQLFGESIGVAGWLYPGSVVRHVAFTKKTKFEEKPQLAFALLYAPVACHYFVLRSHTKPEHTQYALVIPEVVDLEIYAQEYWNLGNLDYKDFNVSSLGDAALRYLTYETIIELATPDQVKRCQVILFGTVVWSKQQKTRIEIAVVEATEIIDFIYKLSRISFPEHQIVKYKNKNFIICNLFRGTIANNLVKDFPWWANLYKIFKHESLLKLITNDGVYKMIQNSEWNLESQKLFIKACHEALKKIYAKIYGRANEGQYAQIERENTRILSQLGRCTNAENFRKFIAEFWGRAGQLSILEKHWEELLPLTSGIMDWKVARDLTFIALASYPKSNMVEKQILEISDSNSE

SEQ ID NO: 438 - protein, 324 aa, Planktothrix sp.
MFHLFGNILTSYGTAANNRGENEGNITPLQKLNWKGEVHTTISSEAIRWALRYYWQNVGYPVNRHWYENAQPVAAHVLQDPNFDDIRFIDDDILGFMQAEAAKVEASDESGGAAEEASQDDNKKSSKGKDKQTSPRKGKQKPKGKITARRGVLEVTRAVSMIPFTGDITFNAVSGVKGRNSLYATEIHATRYQYGFALTPDSLKDKSRIHPVLDGLISIGEVAGNHARFLYDFSPESIVLRWTHDFSPRFLYCFEQDELGNMSVSNLVRQVEVGDIDPKELWIGGLISQGLEDLGANVFPGVKSAVKALKQVIAEDLQLSSGSD

SEQ ID NO: 439 - protein, 208 aa, Planktothrix sp.
VTTIALKVEVPIACFRQSRAREYAETYPVPPPSTVYGMLLSLIGETDRYKHCGTQLAIALLSKPEKSIVIRTFRRFKTKDIHDPKNTKPDYQELLTNVEFVVWVKTDKAKPTLPELLQQAFANPASINRFGGLCLGESRDLVNTVTLLPEKYHGESLWWLVTDEDGSLTLPYWVDHVGSKRTRWQCYELQESQVWQPPDLSWTTIQTS

SEQ ID NO: 440 - protein, 269 aa, Nostoc sp.
MSKGWTLSTIDRRLNNQRGLGVGKQYKPWLTVRDQSSSGRSAREPGWKTGRVHHFHSDLERYAFYMYEFWDQVLDIREQFPMFDVELAMTIAKEQGMQNFRDPKTKVPYIYTTDFMLTMNLHGQEVNVARAVKSHQQLNKRSVRNRLLLEQRYWAAKGIEWQLVTEQVISKVFAKNVEWVHNAYWLEPTRDLNISELLELAKVLKLMLRDNDSTVTKITTRLDKENDIERGTSLYLFKYLVAKKEVIMDMFETQIFKSPSTRLIKKIVF

SEQ ID NO: 441 - protein, 217 aa, Nostoc sp.
MEENLYVNDLIEWELDSGNKVLERILWIDEDYTIAFLIDVNTNKGLPKLKKVSEIVEEISNRLAFKQRVDPWARVIREEDLRDTEKVIRDKAWNIISELVLEEPLIYERKARGSLVQDAIGKYNAREDNNKLIPKTVYGYLRKFWQRGKTKNSLIPDYINCGGRGKTKAYSEVKRGKPRTYKHINEIGEGINITEEDKRCILIGIDRYYKKKKKNIS

SEQ ID NO: 442 - protein, 516 aa, Nostoc sp.
MKFNLIPRSQQPTYTQFKYWYNIEFEQDVKTSIISRKGSKAYALKHRPILGTSKSETPGPGSRYQIDATVVDVFLRSVYNINWIIGRPIIYVVIDVFSQMIVGVYVGLEGPSWIGAMMALTNVVTDKVKFCKEYGIEISEDQWPCKELGDCILGDRGELIGMPPEDTLSPNLYIRIENAASKRGDWKGLVESRFHILHHETKPFIPGFVDQELKQMTGIDYRLRSRLNIDSFTGIVINLIISHNNRRHNRYQRDTDMIADDVLPIPTELWKWGIVNRSGRLKSYDEDVVKLNLLPIIKATITSQGIKLNGKLNNLFKLKGNYLYYTCEKAEKEQWFTKARSGLLTQEEKSIAVSYDIRKPNFIYLPSRDGRSFEKCSLIDPEEIYSNKSFYDIDYKLTKEDVEKQETQGEELQKEIDVTVDIENIVNTAEDNFKLDQDNTITKTQQIAKIGENRKNEKNQRREDEGFELQRTQSESISDSKDEVQTKDTSSNKLLVPDYSNILEQNREGRKRGRSN

SEQ ID NO: 443 - protein, 581 aa, Nostoc sp.
VDEAINFKIYHEWDWKALPNGGLIAIARYRQHKHTEYNLNPLIQTLPEIISNQEFLNKVTLEPDLSDEEIIGEAHDRFHCVERLSDFYFEPLGKTVSLYRLVSTLIMRGYLHRNPLVSEYAKRSREINEAVQDGNGTNILKYISLRISASALTLIGPSGMGKSTDIKRILSLYPQVIVHPNYKIYQVVWVKVDCSSIGSLKGLCSDIFFALSRILKDEKYQKYAVPRNSVDYMLAELAQVANTINLGVLVIDEMQNLANTKTNENDILNYLVDLSNTIGVPIIRIGTPEAKPILMGNFRNARRGGECIEWHRLTRATNKQDDSWKKTDFYYLITGLWVYQWTKTSVKFEKEFYDTFYNCSQGIIDITIKLYKMVQWKAIAIGGEEEISVELINKVAAEGLILVQPMLDAIRSGKQEDIEKYKDIALPDEYVTNYREKCISELIGRQQQEIRDSVRRQQGRKSILPKVRAITTELLKTEKLGLDFDKAIEYAEKVVNSSKEDNDILTLIKKAQILALDGDSVKTSKSQESIQSKSSSKPATNKKRQAAKKTNKKQNLSGNSQSDEGLETLNQFISDDITKIQ

SEQ ID NO: 444 - protein, 318 aa, Nostoc sp.
MLNGFPRIYPDELLYSVIARYHIRNAYKSFHQSDMELFGYASQQIYRVVLPCNLNHLVREIHLHLFYELNINDLIYHHTLYPFYASFLPPQEAWLLKNYMEQKANVSLSEILKCPRNNKEEAKTFLKFCLYCIEEDTQKYGEPYWHRFHQVPGVIVCPIHRIALNNSLVSIETKEIHYHAPSDDNCPLNTSTTIYNDATLQKLLVFANNIEWLINNNFTFKGLSWLRSHYKTYLTNKNFITVFSKDKFIFHEQEFYNAVLTYYGQEFLEAINPKIIKNPEKYFSNCLLACDVNPVIDRIIHILIIKFLANSIEDFFKA

SEQ ID NO: 445 - protein, 230 aa, Nostoc sp.
MAIDYRLTVDNCYKETLACTNRKEFLTCQLQLIYADLSFRAIGQIIAIDHCYHLYSGISKFQPKLHDSKVVRICRITGNPDKFGKLHLNQNSRLRIRLPVDKIPLFYSLAGKSLRIGEDTIRLSIPQIELLQPTEKLRSRIVIIKRCQEPRSFLKVAQRQIEQLGIKGTVNIQANFDGTPKRRTIKVKESTLVGFGLEVKHLSEEDSLILQAYSIGGKHKMGCGFFVPLK

SEQ ID NO: 446 - protein, 504 aa, Nostoc sp.
MSIAKSSVKSRIRLNLSDPSLTRLHIAGVAGLWMTLGQLEKLYPESAKRPSNLTWSRTPHSISLDWDGEEDFIVLDWLLKQSFKISDEGLIDLPGVNSQTGNIQTKIIKHLGIRGTFLQHNKSFKSAGNVSTVLIDEMEAIVLYKKVDEYAHQVFAKHLCNKQGQLLQEPIGIVGWLYPGAVIRHEVFREETKFHEKPELALALLFAPVACQYFVLGSHLEREKPHFILVIPQVTDLEAYAQHCWNLTDLDFDYFHASSLGDAGLRFLTYETNVQQTAFNPVERCLVILFGKAAWSKQQKTRTETAFLQASETVNSVYKLSCIFFPNYQNFKSKNETPIIANILRGIIADNLANSLPWWFNLSTKVQDNYLLELSNDDNQGIYKMISNSQWDIETQKLFIKCVHETLKIRYAKIYARTKEDEYVQIERENIRIVSQLKRCTNAVNFRKFIAEFWGKTGHNPILQEHLDEILSITSGIMDWKIAKDLTFIALASYPKIKTTESNI

SEQ ID NO: 447 - protein, 323 aa, Nostoc sp.
MFHLFGNILTSYGTAANNRGDNEGNVTPLQKLDWKGEVHTTVSSEAIRWALRYYWQNFGYLVNRRWDENAQPVANHIMQDHNFDDIRFIDDDVLGFMQAEAAKMEASHESEGESEGASQDNNKKNSKGKDKQTSRRKGQQKLKGKITARRGVLEVTRAVSMIPFMGDITFNAVSGIKNRNSLYATEIHATRYQYGFALTPDSLKDKSRIHAVLDGLISIGEVAGNHARFLYDFSPESIVLRWTHDSSPRFLYCFEEDERRNITVPDLVRRVEAGDIDPKELWIGGAISKTLEDLGANVFPGVKALVEALKQVIAEDLQLALRS

SEQ ID NO: 448 - protein, 210 aa, Nostoc sp.
MTTIALKVEVPVACFRQSRAREYVETYPVPPPSTVYGMLLSMIGEMNRYTHCGTQLAIALLSEPKKSTVIRKFHRFKKLDINDPSNIKPDYQELLTNIEFVVWIIAGTDKSKPTLPERLHLALTNPASINRFGGLCLGESRDLVNSVSFFSEKYEGESFEWLVQNEEGLLTLPYWVDHVGSQGTRWQRYMLQKSLGRQPPELSWTVIQTA

SEQ ID NO: 449 - DNA, 110 bp, Nostoc sp.
acgctctctactcctgcggtgacaaaattaaaaagttaaacaataagcctaaaagctttacgatataaggaaaagtattagaaattgcttttttttagatgggctttatt

SEQ ID NO: 450 - DNA, 688 bp, Nostoc sp.
tgtcaactatagaaatatccatacaacatctgtctactatgtaagaggttgtttgaaaatatttaggcatcaagatattcctctatttatttagattaataacaaattagaacagctatcctttatttaaaattagaaattttactgaatttaattaattttttggtaaaattaattaaattctacggttatcatttgatcataaaataatacacccaggttgtaatattttttcaattaatccaaccaacgtaatagtctatattagttaatagtctataaagctataaccgttgctaaataagctttacatggcttacgcttatataatttattatatatttttatgattattgataataatatacatcataaagtttccaaatgaaatcttttaatttgtacattttttagtattgaaaatatttactgcaataaaacaatttttctatcaagtattagaagtaaaagagttgacaaaaaataataatcatgatttatgcaaggtaagaaatgatttaaatttacactactgacatcagatccttatccaataagcatttgagcaatctcaatttgatagtactatcagaaaagttgcattattttcctgtcttaagtattaggattattacagactattaacttagcctaagttaactttatactcagtgtttgttcaactgat

SEQ ID NO: 451 - DNA, 320 bp, Nostoc sp.
aacgcctaaagacatcttatattgaaaagctaaatcagcaggagtgaacttaatcacaattttccgtttataaacgcctaaaggcaatctaatattgaagcagggcaatagttgccagttacaatttacgatctctctcgtgatcaacgcctaaaggcaatctaatattgaagcaggcataacaataatcagggattgcgatcgcaagaacgtgatcaacgcctaaaggcaatctaatattgaagcagtactttgccagtgttccagaaatgataaaggctttgtgatcaacgcctaaaggcaatctaatattgaagcag

SEQ ID NO: 452 - protein, 272 aa, Nostoc sp.
MVRGRREWTQAKYERYIKEGRGRGSGKNYKPWLTIQDFPSKGRSSRIPGWKTNRVHHFFSDHEKRLFYLFEWSDIVTDIKEQFPLDNLDLAMSIATDIGIKYPVDTQTGTPYVLTSDFMLTVNRNGKQIQIARTVKQSTELEKKRVNEKLEIERQYYLAKGIDWGIITEKEISRLLAENVEWVHSAYRLEANSEMDTSQLHELSTILKSKLQEEDATINKITTTLDKEMNVNYGTSLYVFKHLIARKELIVDLVKIKLSACPSTEVIQKIVF

SEQ ID NO: 453 - protein, 742 aa, Nostoc sp.
MVKGLFVNDLIEWTLDLNVHIVERIIWIDEGYIIAFVIDINAKKGLPEPKKISEILEAISEGIAFKQQQDPWARIVRDENLTDREKEYRNKAWKIISSLVTEEPSIYYRNFRGSLVKKVVEKHNLERNKDKLVEKTVYGYLRRFWQRGKNINALIPDFINSSGKGKIRGQSSNKRGRPRKYAHEPDIGEGVNVTEEDRKIFRIAISKFYNNSKENYLTTAYELMVKNYYKEGIRYDENGVQKSILIPADKIPTITQFKYWYQLEQDDVTKTLTSRKGAKKFALENRAILGTSKMETIGPGSRYQIDATVADVYLVSKYNRDWIIGRPVIYVIIDVFSRIITGIYVGLEGPSWMGAMMALANVATDKTLFCQEYNINITEDEWPCNQMPDTILGDKGELAGMSVETLIPNLYVHIENAASYRADWKGLVERHFRIIHEYVKPFLPGYIDTDFRQRGARDYRLDGKLDIDQFTEIIVRLIVHHNNKPLKEYERDEAMIVDDIPPIPTELWKWGITNRSGRLRTFSEDIVKLNLMPTEKATITAKGIKMRGKEMYYTCDSAEKRQWFEKARSNLLSKSDKSLIVSYDIRNPNFIYLPSSDGRDFEKCFLIDSEGRYANKNFHDIEYLLAYEELQRQKSQGKQLQEKVDLIADIESVVDRAGKMTDAAKEPNLSKTKKLSGIRENRAFEKAKRRESEGFELANTENQNSFQAVESKLETSEQPESLQPNHLDLLRKNRQERKRGQE

SEQ ID NO: 454 - protein, 562 aa, Nostoc sp.
VDRNEGELIRIPNGELAIVARYIDQKLPEYNANPLIQALPPILSAKEFLNKATRTPEFHEEEKELEAHYRFHCIERLSRYFDPQNKTVELQKVICALIMTGYLARNVLKPEYASRSRQIYNAIKDGGGKNLENYVNLPTSASGLTLIGPSGMGKSTNFQNILNLYPQVILHPDHSVYQIVWLKVDCPHAGSLKGLCTDIFLAVDRLLGTNYFKKFGSSRNSEDYMLAQVAQIAHTHHLGVLVIDEMQNLVTARRSSSDMLNFLVKMDNTIGIPVIRVGTNEAFPILQGNFRNARRGTGEGSVIWDRMVNNDEWSFFMEGIWEYQWTKTPVPFSDEINEVFYNESQGIIDIAVKLYKMAQWRAISIGGKEIITTNLIRQAAKDGLYLVKPMLDAIRSGDKEWMIKYKDIAPLDTTEYQNKCLSELDSDDLKEIQRLARKQQNQQKVSPKLNYVILELLKLEVEAARAKECAEQVIVSGDENVDITFLVNKAYALALQGGQENGNLVKISKNKAKFKPKYVENDIRRTVENAQKEKKSAYEGLKLAGIIKDPVEDFINMSHIDA

SEQ ID NO: 455 - protein, 315 aa, Nostoc sp.
MLSFFPTLYPDELLYSALARYHIRSGNKIFKQTDLELFGYSSQQVCKITLTNHLNYLVKNLPLRSHQTVGNLLQNHTLYPFYATFLIPQEAWLLKDSMSKKLSGSILKLAKVANGSSGESKKFLKFCPQCLEQDTHQYGEPYWHRTHQVPGILVCPTHGVFLCDSSVAIESKGIHYYAASLDNCLTVTGLKSLTNQALKTLVTLANDINLLIHGNFAFKGLAWLRAQYQHYLVSKGLLQIFPAGKFKFDEYGFSKLIFDFYGQESLEALNPKLTQHQGKYFSHCLLGCDLNPSIDRITHILIIKYLANSIEIFFL

SEQ ID NO: 456 - protein, 638 aa, Nostoc sp.
MLGFFPAPYPDEILYSILARYHIRSGNTSPKITLRELFNSQDVIATVDLPSNLNSLIENLQFISNYQIEDLIYKYTLYPFYSVFLPSKRASQVMESMKADFGGDIHTRTGIMASSLKMQRYLRFCPKCLEEDLQNYGESYWHKLHQTPGVLVCLVHGVTLQDSTIPMQGFNRHEYYAASLENCPVIPIQETYSQETYSQETLKKLRLLAQDISWLINSNLFSRELEWFQRKYIALLIEKNFATATGRVNQKRLLDNFLFFYGAEVLEAVNSMVNYENEQNWLFSIVRKHRKSFHPIRHLLVIRFLTNSIEEFFNTDYQYKPFGEGPWLCLNAAVNHYLKPVITNLVVTHCLDNKKPLGTFSCSCGMVYCRTGPDETDEDKQRIGKVLTYGQFWEQKLKELVEIQELGLRETARQLKVDSRTVKHYTAILKLKTFWKSSQKNQLVDSQEVLDSNLNLASDDRIKYREVWKALQQQYPEASKTTLRGLAKGTYIWLYRNDKEWLNKNSPSLKVPLPCVGKVDWAERDKQVLEKVKTAVRTFLSAEKPARVTICRIGKSIGLLALLEKHLAEMPLTKVYLESVTETVEDFQIRRIKWAIKRLDDCGEEIQPWKVIRLAALRENRSQRVQAALETELYKQPD

SEQ ID NO: 457 - protein, 233 aa, Nostoc sp.
MIIDCSLPTQIPPESPLNLTKQRKLLTSELPYIELIFNLIGETVPLDHGYELFSAIAHFEPELHKLDTVGIHTIAGIPKPGVIQLTKNSRLRIRLPMDQVRLVYPLAGKPLRIGKHTIRLGIPEIYLLEPAEKLRSRIVIIQGYQEPESFLTAAQRQLEQLGIQGKAFITKNTDGSPKRRSIKIKRFTVVGFGLEIINLSNEDSLTLLRYGIGGKRKMGCGVFVPVKRKGNAS

SEQ ID NO: 458 - protein, 511 aa, Nostoc sp.
MSIVASVVNPKIYLNLGDPSITWIHRAGIAGLWMTLKQLEKLHPIPAERPGNLTWLLTPRSISLEWQGQDFVVLDWLLKQSFQINKEGLISLTGLNTHSIKIETQINIHLGITGTFLQHNQVFKFDGGKSWSLIVDGIEIDVEYKKAVSYAHQDFAKQLCDKQGQLFGQSIGVAGWLYPGSVVRHVAFTKKTKFEEKPQLAFALLYAPVACRYFVLRSHIKLEHTQYALVIPEVVDLEIYAQEYWSLGNLDYKDFHVSSLGDAALRFLTYETIIELATPDQVKRCQVILFGTVVWSKQQKTRIEIGVVEATEIIDFIYKLSRIYFPEYQIVKYKNKNLIISNVFTGTIADNLVKGFPWWANLYTTFKNKNLFKFITNDGVYKMIQNAEWNLESQKLFIKACHEALKKIYAKIYGRTNEGQYAQIERENIRILSQLGRCTNAENFRKFIAEFWGRAGQISILEKHWEELLPLTSGIMDWKVARDLTFIALASYPKSNMVEKEILEISDSNSE

SEQ ID NO: 459 - protein, 324 aa, Nostoc sp.
MFHLFGNILTSYGTAANNRGENEGNITPLQKLNWKGEVHTTVSSEAIRWALRYYWQNVGYPVNRRWDENAQPVADYVLQDPNFDDIRFIDDDILGFMQAEAAKVEASDESGGDAEEASQDENKKSSKGKDKQTSPRKGKQKPKGKITARRGVLEVTRAVSMIPFMGNITFNAVSGVKGRNSLYATEIHATRYQYGFALTPDSLKDKSRIHAVLDGLISIGEVAGNHARFLYDFSPESIVLRWTHDFSPRFLYCFEQDELGNLSVSNLVRQVEVGDIDPKELWIGGLISQGLEDLGANVFPGVKSAVKALKQVIAEDLQLSSGGN

SEQ ID NO: 460 - protein, 208 aa, Nostoc sp.
MTTIALKVEVPIACFRQSRAREYAETYPVPPPSTVYGMLLSLIGETDRYKHCGTQLAIALLSKPEKSIVIRTFRRFKTKDIHDPKNTKPDYQELLTNVEFVVWVKTDKAKPTLPELLQQAFANPASINRFGGLCLGESRDLVNTVTLLSEKYHGESLWWLVTDEDGSLTLPYWVDHVGSKRTRWQCYELQESQVWQPPDLSWTTIQTS

SEQ ID NO: 461 - RNA, 130 nt, Nostoc sp.
uaguuuauuaauagagguaguagcuguuguggaggaguaauucgguucaacaaaauauaauucgguucaacaauucauaaaacgauugaacaauaaccucuaaagaaguacgauuguaccaaguaaaagu

SEQ ID NO: 462 - RNA, 674 nt, Nostoc sp.
uuguacaaucaucugaguaaccucauugaugggguuuaacaaaagucgaucgcagucucuucccggagggcgaucgccuuugucuuguuacuauauuguaguuaccuguuauuacuaaaacaauagcguuacuacaaaauuuucaaaauucgccacaauuaagguaaauagaguuauuacagauugaaaguuuucagcagaaaguaguauggcaaagcggcagacaacaaaauugagcaaucagaucauuguuagaauggacgaugagacaaaggaagcuuuuaugaauaaagcuaaggcugaaggcaagacagccucagaauugaucaugggauggauucguucuuacauggcugaagaacuccaaggaacuccagacuuagccaaaaugcaagcggacuuggagaaucuaaaacaacaaguugcugcacuccaaaaugaauacuugggaaaauuagcagccugagagaagagaacgauucucucaggcuauggauagaucaaauuaucaguucugccccuaagaacccaaaaaacccgucagaugccugacggguuuaguuuuguuagggagauuaacuaugggaagauaugcaguuacuacgaguaauaaauagguaguaacuaaauuuaagauuccgaucgcacucaaauccguuaacccauaagacuuu

SEQ ID NO: 463 - RNA, 459 nt, Nostoc sp.
ugcuuaacgucugacgacaucuaauguuaaagaauacuguaccaaggguuccccuuaccccauaucccauuguucaacgucugacgacaucuaauguuaaagaaccuuccgauaguaaucccagguuugcugaauaaauucugcucaacgucugacgacaucuaauguuaaagaaccccuuuacguaaaaacucugggggcaauuuggaaacugcucaacgucugacgacaucuaauguuaaagaacaagagcuugauaaauaguauuaaguucaacuaucacugcucaacgucugacgacaucuaauguuaaagaacuaauguuuccuugaauucccucaauuuggcaucaacugcucaacgucugacgacaucuaauguuaaagaacacggcguugagugcgaucgcugaaagccuaccgucugcucaacgucugacgacaucuaauguuaaagaac

SEQ ID NO: 464 - protein, 272 aa, Nostoc sp.
MARTKQEWTQAKFERYMKEGRGQGSGKNYQPWIKIQDFPSKGRVSRPPGWKTNREHHLFSDHEKRLFYLFEWSDSIIDIREQFPLIDLDLAMNIATEMAIEYPKDVNNNTPYVLTTDFMLSVKQGKQIVEKARTFKLVKDLGIKSVAEKFELEKRYYTAKGIDWGIITEKEIPTLLVKNVEWIHSSYKLEAAAEINVDELNNIANILKSKLQESDSTINKITNCLDKEMNLEIGTSLYIFKHLLANKKIIMDMQTNAISSSISAREIQKIIF

SEQ ID NO: 465 - protein, 742 aa, Nostoc sp.
MNNNLFVNDLIEWIDESGNNFVERIIWIDEAYIIAFTIDINIKTGFPVSKRVSDIQEAIYEGRALKLRTDPWARIVRDEDLSAKEKEIRDKYWDIISSIVIQEPSIYYRDKRGSLIKQVIEKYNNNKSEGKLIERSVYQIIRRYWQRGKDKNSLLPDYANSGGKGKVRASREKKRGRPRKYAHEPDIGVGINITDEDKKIFRLAVTKFYHNQKENFLTTAYDLMIKNYYSEETIYDENGVKKHILIPPDKRPTLTQFKYWYDVEQGDIRKKIISRRGAKKYALEHRAITGNSTMETIGPGSRYQIDATIADVYLVSAYNRNWIVGRPVIYVVIDVFSRMITGVYVGFEGPSWIGAMMALANAASDKVAFCKEYGIEITEDEWACHHIPDAILGDRGELAGMAVETLIPNLGIRIENAAPYRADWKGLVERHFGIIHGHIKPFVPGYIDKDFRERGARDYRLDSKLDIEQFTEIIIKIILYHNNEHYLDNYERDEAMIADDVPPIPRELWQWGIANRSGRLRTIPEDIVKLNLMPTENATITERGIKFKGMYYTCQKAKNEFWFEKARSNSLSRLEKKLEISYDIRKPDYIYLRSPDGRNFEKCFLLESESKYFNKNLHEIEYLFAFEELQKQKNKGLKQQQKVDLIAEIESVVNKAKKMTEEMKDDKLSNRKRTAGIRDNRSAEKSKRRKIEGFELEKSDHENTSNTVDIESQKVEQPQSLQPNYLDILRQKREERKREQDK

SEQ ID NO: 466 - protein, 562 aa, Nostoc sp.
MNKINDWKWVEIPNGKSAAVAKYNDHKLPEYNNNPLIQALPPILSGEEFIEKAIILPSYAPEEREMDAHRRFHCVERLSRYFQPLNKTVNLQQVMCALLMQGYIARNISKPEYARRSRQIYEAIKAGDGRNLDVYVNVPTSTSASGLTLIGPSGMGKSTNFINILNLYPQVILHPEYSTYQIVWLKVDCPHAGSLKGLCTDIFLGIDRLLGTNYFKKFGASRNSEDYMLAQVAQMAHTHHLGVLVIDEMQNLVTARRSCSDMLNFLVKMDNIIGVPVIRIGTNEAFPILQGNFRNARRGTGEGSVIWDRMRNDDEWYFFMETMWEYQWTKISTDFSDEFNDVFYDESQGIIDIAIKLYKMVQWRAISLGGKEAINANLIKQSVKDGLFLVKPMLNAIRSGDKEWMIKYKDIAPIDTTEYYNNCLSNLETKDLKEISRLAKKQQAENGHLSATQRHIILKLLELDVEPQLAKECAVQVINSGEEDADIPILVKQAYALALGGQVQEATVKKVRTHTLKAKPKYQINDIRQIAEKAKKNQTSAYEGLKSTGIIKDPVQDFITIT

SEQ ID NO: 467 - protein, 315 aa, Nostoc sp.
MLSFFPTLYPDELLYSALARYHIRSGNKTFKQTDLELFGYSSQQLCKVTLTNNLNYLVKNLSLFSQLTVSDLLQNHTLYPFYASFLIPQQAWQLQDSMRKKLGGSILEVAKVANHSADNSTKFLKFCPICLEQDTQEYGEPYWHRIHQIPGILVCATHRVVLHDSSVAVDSKGIHYYAASPENCLTNQNQVKCADNTVEKLLILAHDIWNISTINIPFKGLTWLRNQYQSYLINQKFMTLLPGEKFRFNEKSFSNSICDFYGQEFLEIINPNLIRNPDKYFSGYLLACDLNPVIDRITHILIIKFLANSVEIFFT

SEQ ID NO: 468 - protein, 636 aa, Nostoc sp.
MVSFFPKPYPEEILYSVIARYHIRSGNTSPKITLQELFNSQTTVATVDLPSNLNNLIQNLQFISNYQVEDLIYKHTLYPLYSPFLSANRSSQVLESMKGDYGGDIHTRAGIMASSITMPKYFRFCPTCLEEDLKTYGEPYWHRIHQIPGVLVCPFHAEVLQNSLVPLHGFNKHEYHAASTDNCSITKESTFFSTDILKKLLLLAKDFWWLLNSEIPCQEPQWFRKQYTNLMIEQRLATATGRIYQKRLLDNFLFFYGREMLSAVDSMVNHNDSNNWVTSIVRKHRKSFHPLRHLLIISFLKTSVEEFFKQDTEYKPFGESPWLCLNAAAEHYLQPVITSLDITLCCDTKKPVGTFSCSCGMIYCRTGPDETDEDKLRIGKIKTFGQLWEQKLKELVEVEKLGLRETARRLNVDARTIKRYVSRLRLTTYWQTRKENDSVGLQELPEIDPNFATELKLKHRQNWMVLQVQNPEASKTTLRKLAPATYIWLYRNDREWLNQNSPALQVAVPSVVRVDWHERDQQILTQVQDAVRSLLNAEIPEKISISRVGKTIGLLALLEKHLDQMPLTKAYLESVVETVEEFQMRRIKWAIKLLDECGEEIMRWKVVRVAALREDCSERVSAFLESELEKAYKKER

SEQ ID NO: 469 - protein, 222 aa, Nostoc sp.
MGDNFHVSTQSHATEVLNPQLIYVDLSFRVIGQTLPIDHGYALYAALTHLQDKLHSLDDLSIQTIPGIPDGNDSLHLNNHSRLRIRLPVDKIPLVYPFAGKSLTIGRHKIHLEIPQMYLLQAVEKLRSRIVVIKGYEEPKGFLAAAQRQLEKLGVQGIASIPTKADGKPERRSIKIKKFTVVGFGLEVTNLNDEDSITLQKYGVGGKQKMGCGVFVPVNEKR

SEQ ID NO: 470 - protein, 510 aa, Nostoc sp.
MINTTANSKIQLNLSDSSTTLLHRAGIAGFWMTLKQLEEIYPNPAQRTGNLTWVLTPHSISLNWEGQDFAALDWLLKQSFQISDEGLIFLTGLNPKAIHIERQIIIHQGITGTFLQHNKFFKFSDKKLKSIIVDGRQFVTEYKSAMSYAHQHFAKKLCDESGQLLQEPIGIVGWLYPGAVVRHSAFPKQTKFEEKPEYALALLFVPVACHYFILRSHTKPQSTNYILVVPEVNNLEFYAQHCWNLSNLSYRDFHVSSLRDAGLKFLTNEAAIQIKQNCVKRCQVFSFGTLIWSEQQKVRTETATLELTEKVSFYYKFSRSCFSNYRIVDYENQHFILTSLVQGIIANNLGLGLPWWNDFGNILTSSNLFNQIADENQGIYMMIQESEWDIESQKLFIKACHEALKVIYAKIYSRTKENEYAQIERENTKIISQLGRCTNAENFRKFIAEFWGKAGQLSILEEHWEELLPITTGVRHWKMSRDLTFIAIASYPKSKNIKPESSEISQTSSE

SEQ ID NO: 471 - protein, 332 aa, Nostoc sp.
MSHLFGNILTIYGTAANNRGENEGNITTLQKINWKGEVHTSVSAEAIRWAVRYYWQNNGYEVNRRWDENAQPLADHIWQDTNFNSVRFIDDDVLGFMQAEAARVEAGEQSGGEVQEASAGEIQNVSQDEETASPKGKGKKTSQRKGRERSQGRVTAKRGVLEVTRAVSLIPYGGNITFNAVSGTKGRTSLYGTEVHATRYQYGFAMTPNSLQDKSRINAVLDGLISIGEVGGNHARFLYDFSPDSIILRWTHDFSPRFLYCFEQDEWGTISVPDLVRRVEAEDIDPKELWIGGAIARDLGNLGANVFPGVKKVVEELLKVITRDLQLPPRSS

SEQ ID NO: 472 - protein, 210 aa, Nostoc sp.
MTTIALKVEVPIACFRQSRAREYVETYSVPPPSTVYGMLLSLVGEENRYTHCGVKLAITLVSEPAKSTVIRTFHRLKTKNIHDPKNNKPDYQELLTNIEFVVWVDPGVDKARPNLVQRLEEAFTNPASINRFGGLCLGESRDLVNDITLLPKNYYAESMRWLIKDEHGLLTLPYWVDHVGSQGTRWLRYELQECQVLQPPELSWTSVQSD

SEQ ID NO: 473 - DNA, 120 bp, Nostoc sp.
aatcgagaaatattgaggttgtggaaacataataaagttgtacaataaataataaagttgtacaatgcctaataaagttatacaatttctcctatgggtgagtataattccatctgtagg

SEQ ID NO: 474 - DNA, 407 bp, Nostoc sp.
cttccatattatcggctcaacatgaaatagagtgcgatcgcctccctcgaaactaaactgttgattcagctttgtactgggaatgcgatgcgatcgccactaaatcttggagtaaatattcccaaatccttacggggaagtaatttgcaaaattgtacaacttttttatttctttttggatagtagcctgatgaaattgtagaactttattttttcaagacttcttagtaatcaacgatataacaatccttgtagccgcgcaaattatacaactttattatatttatacagaggttgtagagaaataattcgattcaacaataaagatgttaaaaataacctctaaagaattactaaaataattgcaaatagaggttatttttattggaacagagacaaaacaggtt

SEQ ID NO: 475 - DNA, 397 bp, Nostoc sp.
atcttcagtgatagatgcttgtaaaattgaactagagcttaggcgagtcaacaagtttggcgatcgccgtgcttcaacattagatgccattaggcgttgagcaggcatcgtgcggggtgagaattgggtttacgaaaatgtgcttcaacattagatgccattaggcgttgagcaggtagttagtaataattaattctttgcccttttttacttgtgcttcaacattagatgccattaggcgttgagcagagtctagatattgcaacattaacattctgagggttctgtgcttcaacattagatgccattaggcgttgagcaggaagattttaattatcgccatgtcggggaaatagaagtgcttcaacattatcagatgctgttaggtgttgagcaa

SEQ ID NO: 476 - protein, 270 aa, Chamaesiphon minutus
MVRSKRDWTEEKLDRYMKEGRGHGIGRDYNPWIKVSDFSSSGRVSRVLGWKTSREHHFMSDGETRLFYLFEWSDRIVDIREQFPLLDRELCFKIAEDMGVEYPKDPKSGAPYVLSTDFMLTVTHKGKNTYEARTFKPSKSLNNKRTAMKLELERRYYAIKEIDWKIVTEKDIPKLMIKNVEWIHSSHKLEGNKEANKEELHHIIKILRSKLETDTTTVGKVVNDLDIEMNVGLGTSLYLFKYLVANKLISVDMLTEKSLTFFPTKDLKFN

SEQ ID NO: 477 - protein, 748 aa, Chamaesiphon minutus
MQVHLFVNNLVEWISEDGKNQIDRILWIDEGYEVAFLINIYEEKSLPRQVFINEIEACIKSSAAIIIKKDPWVLIVLEEELSSKDKILRDAAWRIISSIVTQEPPIYERNQRGSLVLKLIEDHNTTRSSSEVEGKLTKKTVYKYLKRYWQRGKNINALLPDYKNSGGKGKQKLAGDVKRGRPRKYANDPEIGIGVNVTEETKMTFRVAISQFYHTSEKRSLVAAYEKMIQEYYSEEDLSNYDDLHGSIAMQDRIPSLVQFKYWYDLEHGQNVEKKISTRIGKREYLQNYRPITGNSTAEVTGPGSRYQVDATVGDVYLVSSYNRKWIIGRPVIYVVIDVFSRMITGVYVGLEGPSWLGMMMALANMAMDKVEYCRQYGIDISEDDWPCHHLPDAILGDRGELISKNANIVTQNLNIKIENAAPFRPDWKGIVERRFRIINEKVKPFIPGAVDIDFNQRGGRDYRLDSKLDLDQFTQIIIRMILHHNNQHMLKDYPRTVEMIADEVLPIPAQLWKWGIIHCSGRLRTLDPDIIKLNLMPRGNATITEKGIKFKGIYYTCDRADKEMWLSNARAGSLSRAEKKLEVSYDPRKTDYIYIPAQDGRSFTQCILIAPDSKYKSHNFYDVGYLFAEEELQRQKSANRELPQTIDLNKEIEKIVDRAVDMTNAVQDPTMSKLARTSAIRDNRSIEKENRREEESFDLSPKEKDSSKILSKTDPDKSSSISPQPSLKPNYTDLLRAKREKNKRGKN

SEQ ID NO: 478 - protein, 559 aa, Chamaesiphon minutus
VEKTDDKITIPQNIDRKHMGVEAIYIDQKLREYNENLLIQALPPTFDNEEFIDLVYEEPEYNDDEVCLNKSERFHCVARLSSYFDPQGKTIELNNNISILIKRGYLARNPLKPTFALRSRQIYGAIENSSGRELERYVSQPTSASGLTLIGPSGMGKSTNLHKILSLYDQVIFHPKLSTYQIVWLKVDCPHAGSLKGLCTDIFMAIDKLLGTTYHTKFSSRNHTEDLMLAQVAQLANTHHLGVLVIDEMQNLVNARRRKDDLLNFLVKMDNIIGVPVIKVGTNEALPIFQGNFRNARRGTGEGSVIWDRMQKDDDEWDLFVENLWKYQWTRKKVELSTALEEAFYDETQGIIDIAIKLFRMVQCRSIALDGDEAISVDLIRQVANDGLHLLKPMLAAIRNNDKEEMLRYKDIAPLDILAYEQKCLKKLHELTLRKNKQLQDHKIDSNLLRATIAELLELDVSPHVAKECAEQVITNNKAEADISVLVKQAYKLSLVGSTGHTSALVKQQPQPKKKKVEPAYQKDDLRQIVAKAIDSNTSAYEDIKSVGLICDPVAEYIN

SEQ ID NO: 479 - protein, 319 aa, Chamaesiphon minutus
MCALASFPRLYPDELLYSGLARYHIRSGNQSFRQTDLDLFGYSSQQACRVTLTNNLKGLVKQIAHISDYRVRSLMEHNTLYPFYAAFLSPIEIRKLGSATIEKRSGSILEQARVDLDSTSDRRKYLKFCPLCLTTEIEQYGEPYWHRLHQIPGLVICTQHRILLLDSSVLIDSHGVHYHAASDENCIVDMEQSELAPDSLKHLLEIATDLVWLVDTRIDFRGMGWLRDRYIAQLCKRGSVKKLLRGEFKFDERELFQSFRDFYDEESLNWIEPRFVDTEGKYLIHCLFAGDLDPKIDRVAHILIIRYLFGSITDFVMSH

SEQ ID NO: 480 - protein, 218 aa, Chamaesiphon minutus
MTILPDRTSEERDCCRSCSEEFGDYLFPVEGQSIGVDHAHPLYGGISQIIPEFHESNSIGIFGINGKLSGAYSKRLNIDVDSVLKIRLPLDLSRSIYKLAGKTLQIHQDKIYLGIPELELIVPSQNLEARIVTIKGFLDASTLDTAAQNHLDRLEIVGKVRVLTRSDGQPRCRTVKINKKKVVGFGVRVEGLSDLDSLMLQQQGIGGRRKMGCGLFTP

SEQ ID NO: 481 - protein, 275 aa, Chamaesiphon minutus
MKSLYSPAHPTKLSKSEFGIAANGWSDAALKFLLKTTVVNQQSQADIHRCLVIPFGKVTWSKQQQTRLAAETIEIETQHLELYQTFCGESRQDDPLSQFIAENLIRGKPWWWGFTDVFIHKKAYLAIKFRQDRIHDMVKKTEWDTESQELFVRACHQGLRITFGKIGGKTKEGDYPQFERKVIQLRSNLERCQNASAFRDFITSFWGNAGNIQVLQESWQKLLPLTTGQSDWKMAKSLFFLALASYKGEEKLPDPDKLPAEDPSTAITEPEVRHV

SEQ ID NO: 482 - protein, 181 aa, Chamaesiphon minutus
MFNLFGNILTAYGVAANNRGENEGNISKLQKLLWHGETHTTVSAEAIRWSLRYTWQRQGLPVNRVWNPLILESTWEDPNFDPDKYLDDDILGFMHAEAAKIDDAEEDPEVPPIPAKGRAKGKPKPKGTAVKRRGALDVTPAVSTRPFHGDVTFSARSGVKDRNSLHATERHATYYQSLVTS

SEQ ID NO: 483 - protein, 212 aa, Chamaesiphon minutus
MTINKIALQVEVPIACFRDSRAREYIATYPVPPPSTVYGMLLSTVGEENRFRHCGVKLAIAMLSETAKSRVIRKVRRFKERDINSSKNSKPDYQEILTGIKFVVWIDAAEDRSILNLAERLHNAMVNPSSVVRFGNICLGESRDLVNSIDLLTNEHQQGALKWLTQDEYGEITLPYWIDRLGSERTRWLRYRLIKSVDWKPPALSWTQIQTD

SEQ ID NO: 484 - RNA, 128 nt, Chamaesiphon minutus
aauaauuaguuuaguuauugugauaacacugugauaacacaauaaagucguauacuaaauaauaaaguuguauacugacuaauaaaguuguauacuauugucugugaguguuuacuuagcauuugcag

SEQ ID NO: 485 - RNA, 554 nt, Chamaesiphon minutus
uucacugcgagcaagacauuagucguauuuuugacacuuaacugagaaaagauugagcuagaaccuaaucagagcaaagcuuuugagauaguauacaacuuuauuaucucuaucuggauagauagcgcaaucaaaguauacaacuuuauuucuaaauaauugaaaaauggcgacgagaaaucaagguuuucagccuuuaacaguauacgacuuuauuauguuuuuacacaccauucauuacgaaagcauuacuauucguaguugcacuaauguuugcuguguuaauauuuguuagauuuucaauuucaauaaaaauauuuacuguauugauuguaauacuaguuugcauuuuauuaacuauauuuuaauuugaaauuuuggaauuuaauuuauacugccguguaaccgaucgauucuaauaauaucuaaaccuucuaaaucgaucgaauuuugacacaguuaaucaaaggguaauuuaacuguuauauaggaugauuuugaaaucucacccacccuaacaagcaauccugaaggcgggugagaugccauuuaga

SEQ ID NO: 486 - protein, 929 aa, Nostoc sp.
MLSDIEFEHWCRRLNLSEQARKVIEQIRTSEPSRRVGGGKKNVSGRYPSSKMGVSIQFESHRNELAHIYKLETDDDVLEYYDQPPPIFLDYLSKNGRRNYHSHTPDFFVIRKSAAGWEECSVEQNLLKKVQDSPNRWQRQEDGTWICPPGKEYAAQFGLYYVVRSSAEINSIFLRNFVWLEDYLNNQQLTVDDEITDAVCNLVKLQPGISLANIIYQIKEASIDDLNTLIATNQVYVDLNTYLLAQPEKVKVFLDEEEAFTFNQITKVSEPQAINKLGIFKASVGTSIFWDGSKWEIANTGEKSIALITQDGKFIDLPNHVFETLVRDKKITSLQTPEEPTINSEVEELLRKASTEDRKEATSRYKAIEAFLNGNSSNKPNRSQRRWIASYRKAEKTYGRGFIGLLPKHRDKGWRRQGIPEEVLLFMQQHIEINYENIKQHSIRHAYQSFKDLCNEKGYKPPSSESYRQAVRNRPQYKQIQKRMGDRAAYKEEPFYWYIHREETPPHGDRPFEICHIDHTEVDVELLSAIMLKLGMDISVIKEKASMGRPWLTLMLDAYSRRIIAAYMTFDSPSYRSNMMILKMCVQRYGRLPQIIVVDGGADFGGTYFETLLAYFRVTKKERPAAKARHGSVIESYFGVADKEFWHNLMGNTQITKNVRQVTKSVNPKNNAVWTLAKLYSYFCEYCYEIYDTCPHPALRMSPREAFNIGTARSGSREHTFINEEEFKFLALPSPTDSAGTRKITQEGVKINYLYYWHSCFSRFRNIKVEVKYDPFDITQAYAYINGEWVKCHSRYLRELEGHSERELMIAAAELKKLNRIQNKQFSDITGKKLAEFFRRIEMEEAALAPPWLEAKKAVLQQRLRDSELKQVHAQIEGKIDESETITSTNVENSAFIKAEHLTKQFTESSQQELDDENLVESFEPLEEW

SEQ ID NO: 487 - protein, 394 aa, Nostoc sp.
MSGQYRFPLELLEQPPQKRLQFFKNPGVTIMHHNLKNAFYKLHRIIREPAGSSIILVIGPSGVGKSTLLQLLKNKIIEESLGQMEADPGWIPIVCVEAPAPAKGTFRWKIFYRKILEAVDEPGIDQKINYNSDGIRRDSDGKLAFGAKATEDSLRLAMEKALIHRRPYTLSVDEFQHIGKMASEQLLQAHMDCVKSAVNTTKIPWTGFGTYQLLNFLELSPQLSRRTKIMHIPRYLLEKDEDIQEFKRVLEHLQYRMPLQETPPLKEKYWEFCYERSIGNIGTLKNWLTDAYDLAVFEDANTLTLEHLQETAKSSSECEQMALEAIEGEEKLTDSQDKSKSLRTILGLAKDETQNSNKSSTHVQEHNQKSQKSSNKTKAFKRNPSRDPVRGEPV

SEQ ID NO: 488 - protein, 455 aa, Nostoc sp.
MNINISSELRELRKSQLPTRSRLYHLKPIGVGTSTVESLTSYITRLAVSHCLPTGVLMVTEIAPVINKTYGAGTLHRIYNFTGALNGTGVMASDLVQALENLTQQKNLHFLTLLTWAEILPSRNLLRRHRAWCSFCYQEWYENGQTIYEPLLWTLDVVKVCLRHQQPLTQKCPHCKEKNFHLAWRSQPGYCSKCLKWLGLNVETQLSNCPYSHKDELEFEIWITNTLGELLAKSPHLTLSPSKDNISKAICAYVDKVAEGNIAAFARQLQVPRNTVWLWCKGQNLPSIKAVLHVCYSLRISLLDFLNFEEDLVDSLSTLRLPLPQTKANRKKSIKPFEADEVKQNLEAVLESNEFPAPSMEEVARRLQCDRRSIFKYFPDLCHAISSRYLSDRKAILENKIEQCCEEIRQITLNLHNQGIYPSEKSVSEQMTMPGYLRYRKVRLALQEIQSQSGR

SEQ ID NO: 489 - protein, 329 aa, Nostoc sp.
MTIYLEHWSIIPLEIPQRSRLFSLEPVAVGTSYAESLSSYLHRLAQAHCLTTQKLVMGEIAPLILKDEEKSELLAKNLSHLLGNRDAKPAINGMREMTGKLVTVLEELTMRQDLRFLTLLSWKGMIYDKGLFRNYRAWCPCCWEGWKQENKTIYEPLLWSFKDIEFCLIHKQRLIEECPHCGSRLPMMARFSPAGFCSHCYGWLGQEIKGEEEIEKYRVNIQGISELIALTPELGYKPIPIELTRKLQLILLVFEQAIGKDLQLLGDLGGIMESLRIASKTNQSQPYHLVKLIIPVCEKAKISVSQLFGSDFKELGKILFGNFRLELKL

SEQ ID NO: 490 - protein, 220 aa, Nostoc sp.
MTAILLQSEEYVDLTFKLRGALIPLDNGYVIYSALSRICPILHELKSIGIHPIAGIPTKNNLLELTTQSRLKIRIYHQHIPLIYPYLAGQAFHIGQNFYQLDIPDYKPLISSESVYSRLVIIKGFQDATNFIEAVQRQLDNLGIQGKIELLTRQDGTPQKRQLTINKEGKQFKIRGFGVKISELNPEDSLTLQEQGIGGKRKMMCGIFVPATRSKEEEET

SEQ ID NO: 491 - protein, 324 aa, Nostoc sp.
MVATQPKISLSLDAADTTIMHRAGMTGLYMTLKRLEKQYTSSRQRGGHISWFLTADTIKLFWEGSDFVALSWLIKESFQLDDTGLIHLTALSNAAIDLRQKIHIHEGICAVFLRHNQFYQAGKIVNAELTVEEKKVEYRYKSLTWYAHQTFAEKLCEADTQQLREDYVQMTSWLYLGGIVRHARTQNTTKLEEKPEYALALLFVPVVCHYCLLHIPSEDLKEKKPHRYGVVIPEINDFEDASQRRWRLQQLETKQLNVSSLGEAGLLYYSLDDIQPEGGYYQACQVWLYEKMNKDSRQRTLMSIEEIEVDKNTLITYQQVQKYF

SEQ ID NO: 492 - protein, 172 aa, Nostoc sp.
VNPIRSIIADNLVKGIHWWSDFWEKLVIEDSNEYLFNQLFFNREGFIIMAENSEEDKHYLIFLKVFQQAMKGNFAKMYAKAEAGKDPPIKKKVERLRAELNYCYDELSFKEYLSDFLVRGGLNKYFNQHQEEIALLIKKIPWQELRIWSLLAIASYKPKDKPIEMNDESEEE

SEQ ID NO: 493 - protein, 322 aa, Nostoc sp.
MMSQKKNDNNIPNYYLYGTVLTRYGLASLNHDMRRGNKTTLQKGYWNGKIHSFVGANAIRWALRFYLQKQGYLVNRVWDEDEHINRLTSEDFDPEEFYDDDIFGFALLESAETEEETSTTKKKKKQKTVSSPNQRIGALAMNMAVSLTPYDGAVKLGAKSGRDKDSTSLHFTEYHATRYQYYFGINPTHLKEMSRILPLIDGIMDMPKVGGSSNIFNYSFCPDSLVFQWTNHFASYISYCFEYCDPKTKEAKLAQEFIDEVECGQIDPSTLWIGGTIVKELKQLDNFDNSPFNRAHIYRNRNELVEALKAVIKRDLGLQESK

SEQ ID NO: 494 - protein, 212 aa, Nostoc sp.
MIAPLILYLDVPFATFRESHAREMGKTYPVPPPATVYGMLLSLVGETDVYRHCGVELAIAMLSSPKKSRILRQMRRFKNADFSHPENVIPCYQEILSNVKCLIWVRSDGEKIELSLRERILLAFDHPELVRRFGCLFLGESDQLIKTIKLVSQDYPEGVRQWAIRDNRGRLTLPYWVDHVGSRNTRFLRYRIEEMPSSLPPDLAWTMITSPI

SEQ ID NO: 495 - DNA, 194 bp, Nostoc sp.
tttttataaagttaggttccataggtattgtttgcgacaacaaccttaagttgtcctgattggtcactttatgcttgtgatactctctggtcaacttatgcttgtcaaatgttgcactccgcagtgagttaggtattagcaaacagaaatgagaggtaattattaagtcagcagagattttacctaaattttag

SEQ ID NO: 496 - DNA, 433 bp, Nostoc sp.
cagcgcgaccagcagaccatcgcatcaagcccaatttccgcaagcatataattttgcagttttattttaggagcgatcgcactcacgagagaattagcatctggcttattcagatgcaaagctatgtttacatcacacagttaattaaatgtgaatttatggatttttaatttataacttttggtcaactaatgcctagtattttcacattaggtcaattaatgcttgtcaatagtttttttgctatgatcgccctcacgaaagaatgaggctttgaaagcatatcttggtcaactattggttgtcatttaggacaacttatagttgttgtcgcattgttgaaagcataaagcttatgctttcgattcaaattgctaatattagatcgtcaatttttgtgagatggaagttaatataattcctaatctccaac

SEQ ID NO: 497 - DNA, 238 bp, Nostoc sp.
ctactctcctaatagaaatcctctctggtataggagcgtaagtagcgatcgcactccatcttaaaccagtgggcgatcgctttgagcaacgcctaacggcatcaagccacgaatcacctaaaagccaagttggcttcaaacatcgcaattttctcttgagcaacgcctaacagcatcaagccacgaatcacagcaaaggtgaaaacccttaacacaggaagcttcatttacaatctta

SEQ ID NO: 498 - protein, 929 aa, Nostoc sp.
MLSDIEFEHWCRRLNLSEQARKVIEQIRTSEPSRRVGGGKKNVSGRYPSSKMGVSIQFESHRNELAHIYKLETDDDVLEYYDQPPPIFLDYLSKNGRRNYHSHTPDFFVIRKSAAGWEECSVEQNLLKKVQDSPNRWQRQEDGTWICPPGKEYAAQFGLYYVVRSSAEINSIFLRNFVWLEDYLNNQQLTVDDEITDAVCNLVKLQPGISLANIIYQIKEASIDDLNTLIATNQVYVDLNTYLLAQPEKVKVFLDEEEAFTFNQITKVSEPQAINKLGIFKASVGTSIFWDGSKWEIANTGEKSIALITQDGKFIDLPNHVFETLVRDKKITSLQTPEEPTINSEVEELLRKASTEDRKEATSRYKAIEAFLNGNSSNKPNRSQRRWIASYRKAEKTYGRGFIGLLPKHRDKGWRRQGIPEEVLLFMQQHIEINYENIKQHSIRHAYQSFKDLCNEKGYKPPSSESYRQAVRNRPQYKQIQKRMGDRAAYKEEPFYWYIHREETPPHGDRPFEICHIDHTEVDVELLSAIMLKLGMDISVIKEKASMGRPWLTLMLDAYSRRIIAAYMTFDSPSYRSNMMILKMCVQRYGRLPQIIVVDGGADFGGTYFETLLAYFRVTKKERPAAKARHGSVIESYFGVADKEFWHNLMGNTQITKNVRQVTKSVNPKNNAVWTLAKLYSYFCEYCYEIYDTCPHPALRMSPREAFNIGTARSGSREHTFINEEEFKFLALPSPTDSAGTRKITQEGVKINYLYYWHSCFSRFRNIKVEVKYDPFDITQAYAYINGEWVKCHSLYLRELEGHSERELMIAAAELKKLNRIQNKQFSDITGKKLAEFFRRIEMEEAALAPPWLEAKKAVLQQRLRDSELKQVHAQIEGKIDESETITSTNVENSAFIKAEHLTKQFTESSQQELDDENLVESFEPLEEW

SEQ ID NO: 499 - protein, 394 aa, Nostoc sp.; identical to SEQ ID NO: 487

SEQ ID NO: 500 - protein, 455 aa, Nostoc sp.; identical to SEQ ID NO: 488

SEQ ID NO: 501 - protein, 329 aa, Nostoc sp.
MTIYLEHWSIIPLEIPQRSRLFSLEPVAVGTSYAESLSSYLHRLAQAHCLTTQKLVMGEIAPLILKDEEKSELLAKNLSHLLGNRDAKPAINGMREMTGKLVTVLEELTMCQDLRFLTLLSWKGMIYDKGLFRNYRAWCPCCWEGWKQENKTIYEPLLWSFKDIEFCLIHKQRLIEECPHCGSRLPMMARFSPAGFCSHCYGWLGQEIKGEEEIEKYRVNIQGISELIALTPELGYKPIPIELTRKLQLILLVFEQAIGKDLQLLGDLGGIMESLRIASKTNQSQPYHLVKLIIPVCEKAKISVSQLFGSDFKELGKILFGNFRLELKL

SEQ ID NO: 502 - protein, 220 aa, Nostoc sp.; identical to SEQ ID NO: 490

SEQ ID NO: 503 - protein, 511 aa, Nostoc sp.
MVATQPKISLSLDAADTTIMHRAGMTGLYMTLKRLEKQYTSSRQRGGHISWFLTADTIKLFWEGSDFVALSWLIKESFQLDDTGLIHLTALSNAAIDLRQKIHIHEGICAVFLRHNQFYQAGKIVNAELTVEEKKVEYRYKSLTWYAHQTFAEKLCEADTQQLREDYVQMTSWLYLGGIVRHARTQNTTKLEEKPEYALALLFVPVVCHYCLLHIPSEDLKEKKPHRYGVVIPEINDFEDASQRRWRLQQLETKQLNVSSLGEAGLLYYSLDDIQPEGGYYQACQVWLYEKMNKDSRQRTLMSIEEIEVDKNTLITYQQVQKYFQTNYQQIKPKQIFIKVNPIRSIIADNLVKGIHWWSDFWEKLVIEDSNEYLFNQLFFNREGFIIMAENSEEDKHYLIFLKVFQQAMKGNFAKMYAKAEAGKDPPIKKKVERLRAELNYCYDELSFKEYLSDFLVRGGLNKYFNQHQEEIALLIKKIPWQELRIWSLLAIASYKPKDKPIEMNDESEEE

SEQ ID NO: 504 - protein, 322 aa, Nostoc sp.
MMSQKKNDNNIPNYYLYGTVLTRYGLASLNHDMRRGNKTTLQKGYWNGKIHSFVGANAIRWALRFYLQKQGYLVNRVWDEDEHINRLTSEDFDPEQFYDDDIFGFALLESAETEEETSTTKKKKKQKTVSSPNQRIGALAMNMAVSLTPYDGAVKLGAKSGRDKDSTSLHFTEYHATRYQYYFGINPTHLKEMSRILPLIDGIMDMPKVGGSSNIFNYSFCPDSLVFQWTNHFASYISYCFEYCDPKTKEAKLAQEFIDEVECGQIDPSTLWIGGTIVKELKQLDNFDNSPFNRAHIYRNRNELVEALKAVIKRDLGLQESK

SEQ ID NO: 505 - protein, 212 aa, Nostoc sp.; identical to SEQ ID NO: 494

SEQ ID NO: 506 - DNA, 194 bp, Nostoc sp.
tttgtacattaaataattattgtcagttttaaatgcgacaacaaccttaagttgtcctgattggtcactttatgcttgtgatactctctggtcaacttatgcttgtcaaatgttgcactccgcagtgagttaggtattagcaaacagaaatgagaggtaattattaagtcagcagagattttacctaaatttta

SEQ ID NO: 507 - DNA, 508 bp, Nostoc sp.
gatgttggacggcataataatttgccagcgcgagcttcttgcaggtcttttttcagcctatcagagaagctacagcgcgaccagcagaccatcgcatcaagcccaatttccgcaagcatataattttgcagttttattttaggagcgatcgcactcacgagagaattagcatctggcttattcagatgcaaagctatgtttacatcacacagttaattaaatgtgaatttatggatttttaatttataacttttggtcaactaatgcctagtattttcacattaggtcaattaatgcttgtcaatagtttttttgctatgatcgccctaacgaaagaatgaggctttgaaagcatatcttggtcaactattggttgtcatttaggacaacttatagttgttgtcgcaaattgttgaaagcataaagcttatgctctcgattcaaattgctaatattagaccgtcaatttttgtgagatgggagtcaatataattcctaatctccaact

SEQ ID NO: 508 - DNA, 181 bp, Nostoc sp.
ttgagcaacgcctaacggcatcaagccacgaatcacctaaaagccaagttggcttcaaacatcgcaattttctcttgagcaacgcctaacagcatcaagccacgaatcaccactcaaaaactgaaataacaccagtccaaactatttgagcaacgcctaacagcatcaagccacgaatcac

SEQ ID NO: 509 - protein, 900 aa, Nostoc sp.
MKEQFEQWVARLQISEAGQKIIEKVRSSEPSRRVGGGSKNVSGRYPSRKMGVTIQFESHRVELPIIYQLEHDEDVLEFYDQPPQIKLDYQASNGRRLGVLHTPDFFVIRTNSAGWEECKTEQELKKLAEKNPNRYFYFEEDNQWHCPPGEVYAHQFGLYYRIRSDREINWVVQRNLQFLEDYYRAESLAVEEAIAQSLLAIVSSQPGIVLAELLNQPTGAKSDDIYTLIAQEQIYFDLNAAPLAEPERCLIFRDEQTANAYRLIVEKPSVNLPAISPVINLATGTPVSWDGKGLNIIHVGETEVILGAENNQLIELKKAVFENLVRQGKITSLQTPENTAISTESWQRFYQASPEDQAEALERYKTIEPYLNGHPPENETIPARTIRDWKAKYLTALQKYGCGYIGLLSHRSVKGNRQRKLPEDTLAIMERFILEDYETLKQKRMLEVYGALVLACEQSSVIAPSYKAFTKEVKRRTGYEQTKKRQGRRAAYQHESFYWELTQKTPRHGDRPFEIGHIDHTQLDVELVCSRTGRNLGRPWATFLVDAYSRRLLAVYVTFDSPSYRSCLMVLRICVQRHGRLPQIVVVDNGPEFDSKYFEILLATFECTKKQRPPAKARFGSVCERLFGTSNTQFVHNLLGNTQITRNVRQVTKSVNPKNQAVWTLGLLYEYLCAWAYEVYDTDEHPALFQSPRDAFAAGMVTSGSRLHRMIPYDENFQILTLPTTSEGKAKVQVGRGVKINSIYYWSNSFRDPQIENTSVPTRYDPFNIGIAYAFVRGQWVQCISQYYSQLQGRSEKELKLASAELRKRQQNYGRQSQVSAKNLAEFLTSVEAQETLLEQRSYDAEAREVFIVIEGGKAATSRNEQPKLIQVPFENTDTQVAEDEAIAPETLVVYEEFSL

SEQ ID NO: 510 - protein, 383 aa, Nostoc sp.
MTQTNGFPLELLTRPTPERLAYFENYTVGHPRLKEVSEILMRTIAEPAGASFIFVYGPSGVGKTTLRLRVEQKLTELVLPLLESDRGRVPVVGVEAVAPESRNFNWKDYYTRALIALEEPLIDHKFDYGVRGISRDNFGKINVESKVVAPALRRALENALIHRHPDVFFVDEAQHFGKMASGYKLQDQLDCLKSLANMTGILHCLLGTYELLTFRNLSGQLSRRSVDIHFRRYCAENPEDVQAFKSVLLTFQQQMPLAEAPDLVSHWEYFYERTLGCVGILKNWLTRALKDALDREATTVTLKDLQKRAWSVAQCQRMFKEIQEGERQLSETETDIQNLRSALGLGAKPIVLPEETPKTTRPPAKVGKRKPKRDPIGVQQDVS

SEQ ID NO: 511 - protein, 386 aa, Nostoc sp.
MLANGLVTYESWDLKQLSIPSRSLLYQLQPVGIRTPMVESLIWCEIIPTRNLFRTQSAWCAVCYEEWSLNNQVIYKPLLWTINSVKVCALHKICLCLQCPHCQQELPLLSWRSRPGYCSKCGGWLGMNLPVKSASELMACSTLSKEELHSQTWIVEVIGELISSTLSFKSPPVKEEIAKSLSLVIDAVTDGNIAEFARLMGIPKNTLWMWQTGKALPVLDILLKICYRLEISLLDLLKPEQLAAKSFTKISHKTIRRSPTLRASPKLFDANQVQDALLAILASDKEPPLTMEEVATGLGYDRRTIFRHFPDLCRAISAKYRSYGKACHTEKIQQSCREVKQIVLKLHHQGEYPSEARVSEIMTNPGYLRYKQVRAALNETRHEIGF

SEQ ID NO: 512 - protein, 335 aa, Nostoc sp.
MVNPRGMTIYLEHWNLKPLEIPQRSRLFSLEPVAVGTPYAESLSSYLHRLAQAHCLTSQKLVMGEIAPLILKDEDKSELLAKNLSHLLRNSDAKPAINGMREMTAKLVIVLEELTMRQDLRFLTLLSWKGMIYDKGLFRNYRAWCPCCWEEWMQENKTIYEALLWSFKDVEFCLIHKQRLIEECPHCGSRLPVMAKFSPAGFCSRCYGWLGQEIKGEEEIEKYQINIQGISELIALTPQLGYEPIPIELTRKLQLILLVFEQAIGKDLQLLGDLGGIMESLRIASTKNQSQPYHLVKLIIPVCEKAKISLSQLFGLDFQELGKILFGNFSLELKL

SEQ ID NO: 513 - protein, 220 aa, Nostoc sp.
MAAILIQSEEYVDLTFKLRGAPIPLDNGYVIYSALSRICPILHELESIGIHPIAGIPTRNNLLELTAQSRLKIRIHHQQIPLIYPYLAGQAFHIGQNSYQLDIPDYKPLISSESVYSRLVIITGFQDSTNFIEAVQRQLDNKGIQGKIEFLTRQDGTPQKRQLTINQKGKQFKVRGFGIKISSLTPEDSLTLQEQGIGGKRKMMCGILVPATHSKEEEET

SEQ ID NO: 514 - protein, 525 aa, Nostoc sp.
VFATQPKISLSLDAADTTIMHRVGMTGLYMTLKRLEKQYPSSGQRGEHISWSLTADTIELFWEGSDFVALSWLIKESFQLDDTGLIHLIGLDNDAIDLSQKIHIHEGICAVFLRHNQFYQAGEIVNTELTVEEKKVEYQYKSLTWYAHQTFAEKLCEVDTQQLRQDYVQITSWLYLGGIVRHARTQNTTKLEEKPEYALALLFVPVVCHYCLLHIPTEDLKEKKPHRYLVVIPEIKDFEDASQRRWRLQQLEAKQLHVSSLGEAGLLYYSLDDIQPEGSYYQACQVWLYEKMNKDSRQRTLMSIQEIEIDKNTLITYQQVQKYFQTNAQKIEYKQIFIKVNPIRSLIADNLVQGLYWWSNFWEKLVMEDSKEYLFNQLFLNREGFIIMVENSEEDKHYLIFIKVFQQAMKSNFAKMYAKAEEGKDPPIKKKVERLRAELNYCYDELSFKEYLSDFLVRGGLNKYLNQNQAEILLLIKKTPWQELRIWALLAIASYKPKEKTINKDDSLTPNNQKLEEVNDDSEEE

SEQ ID NO: 515 - protein, 322 aa, Nostoc sp.
MMTLKKNDNNIPNYYLYGTVLTRYGLASLNHDMRLGNKTTLQKGFWNGKTHSFVGSSAIRWALRFYLQKQGYLVNRVWDEDEHLNRLTSEYFDPEQFYDDDIFGFALLESAETESETSTTKRKKKQTKTSTSNQRRGALAMNMAVSLTPYDGAIKLGAKSGREKDSTSLHFTEYHATRYQYYFEINATHLKDYSRILPVIDGIMELPKVGGSSNIFNYPFCPDSLVLHWTNNFASYISYCFEYCEPQSKEAKFTQEFIDEVECGQIEPSQLWIGGTIVKDLQQLDNFDDSPFKKAHIYRNRNELIENLKTVIKKDLGLEESK

SEQ ID NO: 516 - protein, 212 aa, Nostoc sp.
MTAPLILYLDVPFATFRESHAREMGKTYPVPPPATVYGMLLSLVGETDVYRHCGVELAIAMLSIPKKSRVLRQMRRFKNADFSHPENSIPSYQEILSNLKCLIWVRSEGEKIQPSLRERIQLAFDHPELVRRFGCLFLGESDQLIKSIKLVSQDYLQGVRHWAIRDNRGRLTLPYWVDHVGSRNTRFLRYRIEEMPSSPPPDLAWTMVQSPI

SEQ ID NO: 517 - DNA, 174 bp, Nostoc sp.
gttacgtccatttgttgtacagtgactaattatttgtcgttgtgtgactttacccataactttgccgcaacggcaagcttatggttccaatagagggcggcaaagttatgcttccaattttccatatatacagaaagaagctaactaagtctaccctttttaagtttaatagct

SEQ ID NO: 518 - DNA, 495 bp, Nostoc sp.
gagggtttgcagcttttaccagcataaacaatgatgcaatttaaatgacgattagcttacttgctagacaaaattcttcacctgacccgtcttctagtttatccgtaccactttgtcacaatttagatgcgtttgccctgatggttccagtagtggcaaagttatgggtaaagtcacaatttttcagatagtctaatgaatattgattaaataacaagcgctttgtttgtcctttcccccattccctatgctgtaaacgctttgcccataggcttcttgggcataaacatttgtgacatcatttgatttaaaaacatttagataataatcaagagcctaaaacctgaaaagtctttatgagtgaggattatgacgattaagattatgtatgtcaaccatgacaacaattatttaaattggacaaaaattatttaatggacagtaatatacttgtcgatgaactacttttttgcacgttaacaaaataattagtta

SEQ ID NO: 519 - DNA, 248 bp, Nostoc sp.
ttgagcaacgcctaacggcatgaagccacgaatcacacgcactcataggggcaatagtcagcgtcaatatgctgagcaacgcctaacggcatcaagccacgaattacgcgagactagcagtcggggatggctgcaaagaaccctgagcaacgcctaacggcatcaagccacgaattactaaccactaacatcgggtaattggcaggcttcatctgagcaacgcctaacggcatcaagccacgaattac

SEQ ID NO: 520 - protein, 898 aa, Nostoc sp.
MKEQFEQWVARLQISEAGQKIIDKVRSSEPSRRVGGGSKNVSGRYPSRKMGVTIQFESHRVELPIIYQFEHDKDVLEFYDQPPQIKLDYQASNGRRLGVLHTPDFFVMRTNSAGWEECKTEQDLKKLAEKSPNRYFYSEEDNQWNCPPGEDYANQFGLYYRIRSDREINWVLQRNLQFLEDYYRSESLVVEEAITQSLLAVVSSQPGITLAELLNQSTGAKSDDIYTLIIQEQIYIDLNATPLAEPERCLIFRDEQTASAYRLMVEQPSVNLQAISPVVNIVTGTLVSWDGKGLNIIHVGETEVILGAENNQLIELKKAVFENLVRQGKITSLQTPEKTAISTESWQRFRQASPEDQAEALERYKIIEPYLNGHPPENETIPARTIRHWKAKYLTAIQKYGCGYIGLLSHRSAKGNRQRKLPEDTLASMERFISEDYETTKQKRIWEVYAALVRVCEQSGVIAPSYKAFTKEVKRRTGYEQTKKRQGHRAAYQYESFYWELTTTTPRHGDRPFEIGHIDHTELDVELVCSDTGRNLGRPWATFLVDAYSRRLLAVYVTFDSPSYRSCLMVLRICVKRHGRLPQIVVVDNGAEFHSVYFETLLATFECTKKQRPPAKARFGSVCERLFGTSNTQFVHNLLGNTQITRNVRQVTKSVNPKNLAVWTLGLLYEYLCAWAYEVYDTDEHPALFQSPRDAFAAGIAIGGSRVHRMIPYDENFQILTLPTTSEGKAKVQVGRGVKINSIYYWSNSFRDPQIENTSVQIRYDPFNIGIAYAFVRGQWVQCISQYYAELQGRSEKELKLASIELRKRSSNHAQQSKVSAKNLAEFLASVEAQEALLEQRSYDTEAREVFRVIEGGKAATSRNEQPKLIQVPFGNTDSQVDEDEALIPEILVVYEDF

SEQ ID NO: 521 - protein, 383 aa, Nostoc sp.
MTTLDAFPLELLTQPATERLAYFENKTVAHPRLQEVNEILMRTIAEPAGASFIFVYGPSGIGKTTLRLRAEEKLTELALPKLESDRAHVPVIGIEAIAPESRYFNWKEYYTRALIALEEPLIDHKFDYGVRGISRNNFGKINVESKVVAPALRRALENALIHRHPDVFFVDEAQHFGKVASGYKLQDQLDCLKSLANMTGILHCLLGTYELLTFRNLSGQLSRRSVDIHFRRYCADSPEDVQAFKSVLLTFQQHMPLAETPNLVDHWEYFYERTLGCVGIVKDWLMRALKDALDREATTITLKDLQKRALSVAQCQKIFKDIQEGELQLSETEAHVQDLRSALGLGAKPIVLPEETPKTTRPPKKVAKRKPKRDPIGVQQDVS

SEQ ID NO: 522 - protein, 462 aa, Nostoc sp.
MLASVLETYESWNLKKPLIPQRSRLYQPQPVGLGTPYIESLTGYIARIAELHGVLPGVLMTREIAPMVNKLYFQNGANRGFREIFNRSQALNGMGEMAADLVQVLQKLTLRDDLRFLTMLFWSNILTPRNLFRTRKAWCPICYQERHQNGLVVYEQLLWTINLITICPQHQKPLLDFCPHCNHESPLLNWRSRPGYCSKCGEWLGANQCLKTFTDGEGSIKLQLEWQYWTANVVGELILAAQCFESAPSKENITKSLNIVIDKVAENNAAAFSRLIGVPKNSLWMWQSTKTLPELNTLLKICYELEISLVEFLTPKNIITKSFTKVSQKHLQLSRTPRVSPKSFDQYQVKDALLAILAGNEEPPPTMEEVGKRLGHHNRTISRHFPDLCSAISAKCRNYNKACRLKSIEKLCSEVREIVLSLNAQGVYPTEGRVCELMPNPGCFRYKQVRAAFNDARREFGL

SEQ ID NO: 523 - protein, 329 aa, Nostoc sp.
MTIYSEHWSLKPLEIPQRSRLFSLEPMAVGTPYAESLSSYLHRLAQAHCLTSQKIVMGEIAPLILKDEDKSELLSKNLSHLLGNSDAKPAINGMREMTEKLVTVLEELTMRQDLRFLTLLSWKGMIYDKGLFRNYRAWCPCCWEEWRQENKTIYEPLSWSFKDVELCLIHKQRLIEECSHCGSRLPVMARFSPAGFCSRCYGWLGQEIKGEEDIEKYRVNIQGISELIALTPQLGYKTIPIELTRKLQLILLVFEQAIGKDLKLLGDLGGIMESLRIASRTNQSQPYHLVKLIIPVCEKAKISVFQLFGLDFKELGKILFGNFSLELKL

SEQ ID NO: 524 - protein, 201 aa, Nostoc sp.
MKPHRYKRGHLTYGALSRICPPLHELNNIGIHPIAGIPTRNNLLELTAQSRLKIRIYHQQIPLIYPYLAGQAFHIGQNFYQLDIPDYQPLISSESVYSRLVVIKGFQDSTSFIEAVQRQLDNLGIQGKIELLTRQDGTPQRRQLTINKEGKQFKVRGFGVKISELNPEDSLTLQEQGIGGKRKMMCGIFVPATRSKEEEEI

SEQ ID NO: 525 - protein, 561 aa, Nostoc sp.
MVTTQPNISLSLHAADTTIMHRVGMTGLYMTLKRLEKQYRLSHERGGHISWILTADTIELFWQGSDFIALSWLINESFQLDDTGLIHLVGLDNDAIDLSQKVHIHEGICAVFLRHNQFYQAGELVNTELKVEENKVEYQYKSLTWYAHQTFAEKLCQADTQQLRHDYIQITSWLYLGGIVRHARTQNTTKLEEKSEYALALLFVPVVCHYCLLHIPSEDLKQRKPHRYLVVIPEIKDFEDASQRRWQLQQLETKQLHVSTLGEAGLLYYSLDDIQPESDYYQACQVWLYEKINRASLQRTLMSIEEIEIDKNTLITYQQVQKHFQPNYQKVSGGSGKQVVTFGVALLIQIGLHRLGTLLLWHYHQKIKPKQIFIKVNPIRSLIADNLVKGIHWWSNFWEKLVIEDSKEYLFNQLFSNREGFIIMAENSEEDKQYLIFIKVFQQAMKGNFAKMYAKAEEGKDPPIKKKVERLRAELNYCYDELSFKEYLSDFLVRGGLNKYFNEHQEEIVLLIKKSPWQELRIWSLLAIASYKPKNKPTNSDDNSFPNNQNLEEVNDESEKE

SEQ ID NO: 526 - protein, 323 aa, Nostoc sp.
MMSQKKNDNNIPNYYLYGTVLTRYGLASLNHDIRRGNKTILQKGYWNNGKIYSFVGSSAIRWALRFYLQKQGYLVNRVWDEDEHINRLTSEDFDPEKFYDDDIFGFALLESAETEEDTSTTKRKNKQTKTRTPNQRMGALGMNMAVSLTPYDGAVKLGAKSGREKDSTSLHFTEYHATRYQYYFGIDATHLRDFSRILPLIDGIMNLPKVGGSSNIFNYPFCPDSLVFQWTNHFASYISYCFEYCDPKSKEAKLSQEFIDEVECGQIDPSKLWIGGTIVKELQQLDNFESSPLKKAHIYRNRNEMIEALKTVIKRDLGLEESK

SEQ ID NO: 527 - protein, 212 aa, Nostoc sp.
MIAPLILYLDVPFTTFRESYAREMGKTYPVPPPATVYGMLLSLVGETNVYRHCGVELAIAMLSSPKKSQILRQMRRFKNPDFSHPENLIPCYQEILSNLKCLIWVRSDEEKIQPSLRERIQLAFDHPELVRRFGCLFLGESDQLIKTIKLVSEDYLEGARQWAIRDNRGRLTLPYWVDHVGSRNTRFLRYRIEEMPSSPPPDLAWTMIQSPI

SEQ ID NO: 528 - DNA, 125 bp, Nostoc sp.
ccattcagtaaataaaggctagagacagcttagatgtggctttacccataactttgccgcaacggcaagcttatgcttccaataaagggtggcaaggttatggttccagttatataagctgttct

SEQ ID NO: 529 - DNA, 271 bp, Nostoc sp.
ggtagtgcaataatctggtattgtcttaacatatccttgtggaaaaggataaaattatttacatctttgcatctcaatatttcggagaattttcgcttttacctctgtgccctctgcgtctctgcggttcgttaaagaagaataaaaccacagaggcgcagagaagccagtgcgttgcgggggttcccccctttgtagcaactggcgcgacacagagaaataagagggcaaaggtgtaagtaatattaagcgaactgcaaaaatcgagact

SEQ ID NO: 530 - DNA, 109 bp, Nostoc sp.
tttgagcaacgcctaacggcataaagccacgaatcacttcaccactcaaccgaaatgaaacagaccgagtattttgagcaacgcctaacggcataaagccacgaatcac

SEQ ID NO: 531 - protein, 898 aa, Nostoc sp.
MKEQFEQWVARLQISEAGQKIIEKVRSSEPSRRVGGGSKNVSGRYPSRKMGVTIQFESHRVELPIIYQLEHDKDVLEFYDQPPQIKLDYQASNGRRLGVLHTPDLFVIRTNSAGWEECKTEQDLKKLAEKNPNRYFYSEENNQWHSLPGEVYANQFGLYHRIHSDREINWVLQRNLQFLEDYYRSESLVVEEAIAQSLLAIVSSQPGITLAELLNRSTGAKSDDIYTLIIQEQIYIDLNATPLAEPERCLIFRDEQTASAYRLMVEQPSVSLPAISPVVNIVTGATVSWDGKGLNIIHVGETEVILGAENNQLIELKKAIFENLVRQGKITSLQTPEKTAISTESWQRFHQASPEDQAEALERYKTIEPYLNGHPPENETIPARTIRHWKAKYLIAIQKYGCGYIGLLSHRSVKGNRQRKLPEDTLAIMEKFILEDYETLKQKRMWEVHAALVRACEEAGVIAPSYKAFTKEVQRRTGYEQTKKRQGRRAAYQHESFYWELAITTPRHGDRPFEIGHIDHTELDVELVCSDTGRNLGRPWATFLVDAYSRRLLAVYLTFDSPSYRSCLMVLRICVKRHGRLPQIVVVDNGAEFHSVYFETLLATFECTKKQRPPAKARFGSVCERLFGTSNTQFVHNLLGNTQITRNVRQVTKSVNPKNLAVWTLGLLYEYLCAWAYEVYDTDEHPALFQSPRDAFAAGMAIGGSRVHRMIPYDENFQILTLPTTSEGKAKVQVGRGIKINYIYYWSNSFRDPQIENTSVQIRYDPFNIGIAYAFVRGQWVQCISQYYAELQGRSEKELKLASIELRKHYSNHTQQSKVSAKNLAEFLASVEAQEALLEQRSYDAEVKEVFRVIEGGKATTSRNEEPKLIQVTFANTDFQADEDEAIVPETLVVYEEF

SEQ ID NO: 532 - protein, 383 aa, Nostoc sp.
MTKSTGFPLELLTRPATERLAYFENYTVAHPRLKEVYEILMRTIAEPAGASFIFVYGASGVGKTTLRLRVEQKLTELALPKLESDRARVPVVGIEAIAPESRYFNWKEYYTRALITLEEPLIDHKFDYGVRGISRDNFGKINVESKVVAPALRRALENALIHRHPDVFFVDEAQHFGKVASGYKLQDQLDCLKSLANMTGILHCLLGTYELLTFRNLSGQLSRRSVDIHFRRYCADSPEDVQAFKSVLLTFQQHLPLAETPNLVDHWEYFYERTLGCIGTLKDWLKRVLSDALDREATTITLKDLQKRALSVAQCQKMFKEIQEGERQLSETEADVQNLRSALGLGAKPIVLPEETPKTTRPPGKVGKRKPKRDPIGVQQDVS

SEQ ID NO: 533 - protein, 462 aa, Nostoc sp.
MLASVLETYESWNLKKPLIPQRSRLYQPQPVGIGTPYIESLTGYITRIAELHGVLPGVLMTREIAPLVNKIYFQNGANRGFREIFNRSQALNGMGEMAADLVQVLQKLTLRDDLRFLTMLFWSNILTPRNLFRTRKAWCPICYQERHQNGLVVYEQLLWTINLITICPQHQKPLVELCPHCNHESPLLNWRSRPGYCSKCGEWLGANQCLKTFTDGEGSIKLQLEWQYWTANVVGELILASQCFESAPSKENITKSLNIVIDKVAENNAAAFSRLIGVPKNSLWMWQSTKTLPELNTLLKICYELEISLVEFLTPKNLITKSFTKISQKHLQLSRTPRVSPKSFDQYQVKDALLAILAGNEEPPPTMEEVGKRLGHHNRTISRHFPDLCSAISAKCRNYNKACRLKSIEKLCSEVREIVLSLNAQGVYPTEGRVCELMPNPGCFRYKQVRAAFNDARREFGL

SEQ ID NO: 534 - protein, 329 aa, Nostoc sp.
MTIYSEHWSLNPLEIPQRSRLFSLEPVAVGTPYAESLSSYLHRLAQAHCLTSEKLVMGEIAPLILKDEDKSELLSKNLSHLLGNSDAKPAINGMREMTEKLVTVLEELTMRQDLRFLTLLSWKGMIYDKGLFRNYRAWCPCCCEEWMQKNKTIYEPLSWSFKDVEFCLIHKQRLIEECSHCGARLPVMARLSPAGFCSRCYGWLGQEIKGEEEIEKYRVNIQGISELIALTPQLGYKPIPIELTRKLQLILLVFEQAIGKDVKLLGDLGGIMESLRIASTTNQSQPYHLVKLIIPVCEKAKISVFQLFGSDFKELGKILFGNFSLELKL

SEQ ID NO: 535 - protein, 220 aa, Nostoc sp.
MTAILIQSEEYVDLTFKLRGAPIPLDNGYLTYAALSRICPPLHELKSIGIHPIAGIPTRNNLLELTAQSRLKIRIYHQQIPLIYPYLAGQAFHIGQNFYQLDIPDYKPLISSESVYSRLVIIKGFQDSTNFIEAVQRQMDNLGIQGKIELLTRQDGTPQRRQLTINKEGKQFKVRGFGVKISELNPEDSLTLQEQGIGGKRKMMCGIFVPATRSKEEEET

SEQ ID NO: 536 - protein, 526 aa, Nostoc sp.
MIVSTQPKISLSLHAADTTIMHRVGMTGLYMTLKRLEKQYPLSRQRGGHISWFLTADTIELFWEGSDFIALSWLINESFQLDDTGLIHLVGLDNDRIDLRQKIHIHEGICGVFLRLNKFYQAGEIINTELRFEEKQVEYQYKSLTWYAHQTFAEKLCEADTQQLRHDYIQITSWLYLGGIVRHARTQNTTKLEEKPEYALALLFVPVVCHYCLLHIPSEDLKERKPHRYLVVIPEIKDFEDASQRRWRLQQLETKQFHVSSLGEAGLLYYSLDDIQPEVAYYQACQVWLYEKTNKASRQRTLMSIEEIKIDKNILITYQQVQKYFKTNYQIIKYKQIFIKVNPIRSLIADNLVKGIHWWSNFWEKLVIEDSKEYLFNQLFSNREGFIIMAENSEEDKQYLIFIKVFQQAMKGNFAKIYAKTEEGKDPPIKKKVERLRAELNYCYDELSFKEYLSDFLVRGGLNKYFNEHQEEIALLIKKSPWQEIRIWSLLAIASYKPKDKLTNRDDSSLSNNQKLEEVNDDSEEE

SEQ ID NO: 537 - protein, 323 aa, Nostoc sp.
MMTQKKNDSNIPNYYLYGTVLTRYGLASLNHDIRRGNKTILQKGYWNNGKIHSFVGSSAIRWALRFYLQKQGYLVNRVWDEEEHINRLTSEDFDPEKFYDDDIFGFALLESAETEEDTSTTKRKKKQTKTSTPNQRMGALGMNMAVSLTPYDGAVKLGAKSGREKDSTSLHFTEYHATRYQYYFGIDATHLKDFSRILPMIDGIMNLPKVGGSSNIFNYPFCPDSLVFQWTNHFASYISYCFEYCDPKSKEAKLSQEFIDEVECGQIDPSKLWIGGTIVKDLQQLDNFESSPLNKAHIYRNRNEMIEALKTVIKRDLGLEESK

SEQ ID NO: 538 - protein, 212 aa, Nostoc sp.
MIAPLILYLDVPFTTFRESHAREMGKTYPVPPPATVYGMLLSLVGETNVYRHCGVELAIAMLSSPKKSRILRQMRRFKNADFSHPENVIPCYQEILSNLKCLIWVRSDEEKIQPSLRERIQLAFDHPELVRRFGCLFLGESDQLIKTIKLAREDYLEGVRQWAIRDNRGRLTLPYWVDHVGSRNTRFLRYRIEEMDRLSPPDLAWTMVQSPI

SEQ ID NO: 539 - DNA, 131 bp, Nostoc sp.
taaataaaggctagagacagcttagatgtgactttacccataactttgccgcaacggcaagcttatgcttccaataaagggtggcaaggttatggttccagttatataagctgttctagttttacatataa

SEQ ID NO: 540 - DNA, 389 bp, Nostoc sp.
gtggttaggaggatcttctaatactccagtagttactcagaacagatggatagcccaaagtctctatcccataccagcataaaccgcttctgctccattctaaaaaaattcggcgttttcctgctttctatgcttgattggactcacggcaagcttatccttccaatttggactagcggcaaagttatggttccaaactgtcaatttcatccaaaattagctgacgcaagaatgagggttgtagtgttgttgacggcaaagttatggttccagtaacggcaaagttatgggtaaagtcacaaaactagttgacgcacttttaccgcttcagcaaccaggggaattatagtaccagccattgagtgaccgactaacacaatatcatcatc

SEQ ID NO: 541 - DNA, 466 bp, Nostoc sp.
ttgagcaacgcctaacggcataaagccacgactcacgttttgaaactgcctattgctcctagagcagaattttgagcaacgcctaacggcataaagccacgactcactgtccacaaaatgatatcccggtctgttttagggaattgagcaacgcctaacggcataaagccacgactcaccacatttcctgagttgctgcctgaagcaaaaaagtacccttgagcaacgcctaacggcataaagccacgactcactgctttatcccttggctatcgtgccgagtaaaagattgagcaacgcctaacggcataatgccacgactcactcgttgaaaaagatgaatcgcttgctagcgatcgcttgagcaacgcctaacggcataaagccacgactcaccgcaaccaaagaaacagcccgactcagagaagagttgagcaacgcctaacggcataaagccacgactcac

SEQ ID NO: 542 - protein, 235 aa, Richelia sp.
MKEQFEQWVARLQISEAGQKIIEKVRSSEPSRRVGGGSKNVSGRYPSRKMEVTIQFESHRVELPIIYQLEHNQDVLEFYDQPPQIKLDYQATNGRRLGVLHNWKAKYLTAQQKYGCGYIGLLSHRSVKGNRQRKLPEDTLAIMEKFILEDYETIKQKRMREVYGALVLVCEQSGVIAPSYKAFTKEIKHRPVYEQTKKRKGRRAAYKHESFYWELTKTTPRHGVREAHAAGLSPL

SEQ ID NO: 543 - protein, 399 aa, Richelia sp.
MAFAKRMPQAYRPFEIGHIDHTQLDVELVCSRTGSNLGRPWATFLVDAYSRRLLAVYLTFDSPSYRSCLMALRICVQRHARLPQIVVVDNGAEFNSTYFETLLATFECTKKQRPPAKARFGSVCERLFGTSNTQFVHNLVGNTQITRNVRQVTKSVNPKNQAVWTLGSLYEYLCTWAYEVYDTDEHPALFQSPRDGFAAGMAISGNRVHRMIPYDENFQILTLPTTKSGKAKVQIGRGVKINSIYYWSNSFRDPQIENTSVQIRYDPFNIGIAYAFVRGQWVECISQYYAEFQGRSEKELKLASAELRKRSSNHARQSQSYAKKLAEFLASVEEQEGLLEQRSYDAEAREVFRIIDGGKATTSRNEQTKIIPANFENTDTPADQDEALIPDTLVVYEEF

SEQ ID NO: 544 - protein, 384 aa, Richelia sp.
MTKSTGFPPELLKQSATERLAYFENYTVAHPRLKEVYDKLMGTIAEPAGASFIFVYGASGVGKTTLRLRVEQKLTELALSLLESDRGCVPVVGVEAVAPESRNFNWKDYYTRALIALEEPLIDYKFDYGVRGISRDNNFGKINVESKVVAPALRRALENALKHRHPDVFFVDEAQHFSKMASGHKLQDQLDCLKSLANMTGILHCLLGTYELLTFRNLSGQLSRRSVDIHFRRYCADNPEDVQAFKSVLLTFQQHMPLAETPDLVSHWEYLYERSLGCVGILKNWLTRAFKDALNREATTVTLKDLQQRAWSVAQCKRMFQEIQEGERQLSETETDVQNLRSALGLDTKPITLSEETPKTTRPSRKVGKRKPKRDPIGVQEDVS

SEQ ID NO: 545 - protein, 335 aa, Richelia sp.
MVNPKRMTIHLENWNLKPPKIPQRSRLFSLEPVAVGTPYAESLSSYLHRLAQEHCLTSQKLVMGEIAPLILKNEDKSELLKKNVSHLLGNSDAKPAINGMREMTGQLVTVLEELTMRQDLRFLTLLSWKGMIYDKGLFRKYRAWCPCCWEEWRQKNTTIYEPLLWSFKDVEFCLIHKQRLIEECPHCGSHLPAIAKLSPAGFCSRCYGWLGQEIKGEEEIEEYRVKIQGISELIALTPQLGYEPIPIELTRKLQLILLVFEQAIGKDLLLLGDLGRIIESLKIASKTNQNQPYHLLKLIIPVCEKARISVYQLFRSDFRELGKILFENFGLELKL

SEQ ID NO: 546 - protein, 128 aa, Richelia sp.
MEKELATLVNKKYGSTNLHKIYKHTTALNGSGVMALDLVQALQKLTLRENLCFLTLQTWCKLFPSRNLLRPVRAWCPICYQEWYEKKQLIYEPLLWSLDVVEICPYHNYKLIVECSHCHQKNTTLAWR

SEQ ID NO: 547 - protein, 268 aa, Richelia sp.
VKLASWNHNFADSSFWNDKPAVSSIEYRKQERAEGVYAGVGDKFSSMTALLIPSEEYVDLTFKLRGAPIPLDNGYVIYSALSRICPSLHELKSVGIHPIAGIPTRNNLLEIAAQSRLKIRIFHQHIPLLYPYLAGQGFHIGKNSYQLDIPDYKPLISSESVYSRLVVIKGFQEPSNFIEAVQRQLDNLEIQGKIELLTRKDGTPQRRQLSISKGGKQFKVRGFGVKVSELNPEDSLTLQEQGIGGKRKMMCGIFVPATRNKEEKETIT

SEQ ID NO: 548 - protein, 318 aa, Richelia sp.
MIATQPKISLSLDAADTTIMHRAGMTGLYMTLKRLEQQYPSSLQRVAYVSWLLTTDTIKLFWEGSDLVALSWLIKESFKLDDTGLIHLAGLENDEIDLSHKIHIHEGISAVFLRHNRFYKAGKLVDTELTLEEQKVEYQYKSLTWYAHQTFAEKLCDTDTQKLRCDYVKITSWLYLGGIVRHAKTQNITKLEETPAYAFALLFVPVVCHYFLFHIPSEDLKEKKPHRYLMLIPEIKDFEDASQRRWRLQQLETKQFHVSNLGEAGLIYHSLDDIHTEVDYYQACQVWLYEKMNQASRQRTLMGIEEIKIDKNTLTGHC

SEQ ID NO: 549 - protein, 319 aa, Richelia sp.
MMSQKKNDNNIPNYYLYGTVLTRYGLASLNHDISRGNKTTLQKGYWNGKVHSFVGSSAIRWALRFYLQKQGYLVNRVWDEDEHINRLTSEDFDPEKFYDDDIFGFALLESAETEEETSTTKRKKKKTKVSSQNQRLGALGMNMAVSLTPYDGAIKLGAKSGREKDSKSLHFTEYHATRYQYYFAINATHLKGFSRILPLIDGIMNLPKVGGSSNIFNYPFCPDSLVLQWTNHFASYISYCFEYCDPKSKEAKLTKEFIDEVECGQIDPSTLWIGGTIVKDLQQLDNFDNSPFKKAHIYRNRNEMIEALKTVIKRDLGLK

SEQ ID NO: 550 - protein, 212 aa, Richelia sp.
MIAPLILYLDVPFATFRKSHAREMGKTYPVPPPATVYGMLLSLVGETDVYRHCGVELAIAMLSSPKKSRILRQMRRFKNADFSHPENVIPGYQEILSNLKCLIWVRSDGEKIQPSLRERIQFAFSHPELVRRFGCLFLGESDQLIKSIKLVSEDYLGEARHWVIMDNQGWLTLPYWVDHVGSRNTRFLRYRIDEMDKLSPPEKAWTMIQSPI

SEQ ID NO: 551 - DNA, 287 bp, Richelia sp.
ttttaatagcttatgcttccaataaaatgttgtgactttacccataactttgccgcaacggcaagcttatgcttccaataaaatgtggcaaacttatggttccattttttcgtgataatttttaacatatattccgtatttcatattgtattacgaagtaacacaataattatggttagcttggtgattttttacttataaatacttgactttttccaattttgtgcattaagtgcgtattacataatgaagtgcggaatgtcggttttaagcttcacaacccaagt

SEQ ID NO: 552 - DNA, 249 bp, Richelia sp.
ggttatggtgttgttggcggcaaagttatggttctagtcgcggcaaagttatgggtaaagtcacaaatgtggcaaacttatggttccaattttttttgataatttttaacctatattctgtaccctcactgtcgtaatcacggatttatatggattaaaggattacacggatgattaataggagagtttttatgggttcgtgtaatttattgaattagtattttacatgacgaggcgtttgaaagttag

SEQ ID NO: 553 - DNA, 304 bp, Richelia sp.
ttgagcaacgcctaacggcatgaagccaagactcacaactttacattaattttagggcaagctggaattaagttgagcaacgcctaacggcataaagccaagactcacaatatatgaccgcattggggacaaaatccagtaaattgagcaacgcctaacggcataaagccaagactcacctaccgattatccaggagaagcttgtctgtatttttgagtaacgcctaacggcataaaaccaagattcacccatcatagcatttggcttattcatacctgatgcttgagcaacgcctaacggcat

SEQ ID NO: 554 - protein, 735 aa, Cyanothece sp.
MVKANPGIYLSELQQKIEIASIDDFHVLILTDKIYVDLFAIPLSCPEQVQVFLSATEAFTHSQLTTIVPSNWETFNSPLNVAIGTQISWDGQPWTIVNLGNNYVGLQGENNTFQHLPNSVFSTLVHQEKIVGLSSPNFSSLNPKIEEIFSYTSQADLQEAHRRYQQIEAFLKGTASTPTNRTQRRWLASYRKAEQLYGRGFIGLIPQHRHKGNSLSKMDKDVHQLMEKHIQEEYETHKQPSIRHAFQAFKELCAHTGLRPPSLETYRRSIRNRPVVEQVKKRQGSRAAYQEETFYEFLDRNTPIHGERPFEIAHIDHTLADVQLLSLIMLNLGMEMNEGEHQANLGKAWVTLLIDAYSRRILAAYMTFDSPSYRSNMMVLRICVQRFGRLPQILVVDGGRDFQSGNFEMLLAYSHVTKKERANTRDGSVIESFFGVADREFWHNLKGNTQIMKKVRQVTKSVNPKYHAVWTLDKLYRYFCEYCYEIYDTCPHPTLRMTPREAFEIGLARGGLRGHLLIPYEEFKLLSLPAPTDNDGMRRITPKGIKINYLYYGHPSFERVRNTRVAVKYEPFDVTIAYAYIKGEWVQCRSGYIRELQGRSVKELITASDELKKLNQLQNQQFSDITGKNLAQFFTRIEREEAILTPSWREAKKAVQAQHLRDEELKEVLNEIEGKPSTKETSNDSSEIDLFTFENREYIALSSSISPPSPIQQTQVDEDDDNDEFEELFEPLEEW

SEQ ID NO: 555 - protein, 399 aa, Cyanothece sp.
MALQGFPPELLNQSPQKRLDFFKSPDITFMHKILHKTYNQLYRKVCKPAGASTILLIGPSGVGKSTLMDLLKKRILEESLPQMELEPAWIPIICVEADAPGKGTFRWKKFYQQVLLEVDEPGIKYKIDYNKINYEEEGIRRGNNGRLIIGARATEDSLKISMKQALKYRHPYTLAIDEFQHIGIRANEDLLKAHMDCLKSVVNGTKIPLTGFGTYELLEFLELSPQLSRRTLKIHFHRYRWENDDECKEFKRVLYNLIHRMPFPNQPTITKQIWEFCFERSIGNIGTLIDWLTDAYDLALANDAPSLSFDYLKETAKSRLDCEQMIEEAIEGEARLEETEDSTNRLKVLLGMKSASKPSKSNANSTDPNSTAQKTKKDVKNKPFKRKPVRDQVGGQDET

SEQ ID NO: 556 - protein, 147 aa, Cyanothece sp.
MKPDSYEPLEWYDLKLLILPKFLYLIFLTINFSSSVFASPENLAKAQPHQQKRISPRSCDLNQIENFLNQHLEQSPDLISPLTIIAKNLKVDKKFISRYFRDLCQKIVAKRLSYKKDCYLDSLKQCCNEVEQVTKMLFKQGEYPTED

SEQ ID NO: 557 - protein, 343 aa, Cyanothece sp.
MSNYNELDDGLEIVSLKSPETPKRSRLFSLEPVGIGTSQTESLSSYVNRLAEAHCVKSQKLIMLEIAPQILGKDYQSPLHSKDVSSLFGNTDAKPALNGMRDMKLLLVQALEKLTQRQDLKYLTCLSWKEVINKRGLFRQYRAWCPQCYEQCKQDKVSLYDPLLWSFKDVKFCLHHQCQLVDECPKCGSHLPVIANFLPLGHCFYCGEWLGDNKNKNPKCNFKNFPESLLIIKNIGDLIAVTPRLGSQPTLDEFIQKLQLILFCFEKVISQDLKHIKVLGKIIEHLKLNLSQHGDKPLNLIKIIIPVCSKAHISVSELFLEDLTGLSKILFDNFQINYQLPIL

SEQ ID NO: 558 - protein, 194 aa, Cyanothece sp.
MEAISIHPIAGIPQPLNQLRLTNRSRLRIRLPIDQIPLVYPLAGQTITIDWGIERVSHQAKFQLGIPYPTALQPASTLYSRLVLIHRAETPEAVLEVAQRQLNRKGIKGTIELPTRANGEVQCRLLTIKKKHQLFRLRGFGMKVTKLSEKDSIKLQQSGIGGKHKMMCGVFVPTWRETTEKDENSNVLVIYSGR

SEQ ID NO: 559 - protein, 418 aa, Cyanothece sp.
MTGLNPPSIELINQIHLHFSIGATFLRHCKFCKYGKQTVQEIIIEGKQRKLTYKPIKWYAHQTFAKQLCQAGQLLTDYISIISWLYLGATVRHAMLDKYNKIQEKPEFALVLLFVPVVCQYFIFHPYYEKTDNNNPEKYLIVIPEILDLEEAAYQRWQSGNLAYKNYHVSSLGEAALITYSWHEVETQRSCERTCQVLLYEKFNKDSHQRSLIETRDITINLNILNTYFLIKQFFQENQFDSYGKNRWIKVNFIRGIIADNLVKGVPWWSDFWKILNQEDIDGELAQQLIDNKEGLIAMIEQDKEMEDYKLFVQAFHEALRRNYAKIQKRTQEGERARFDREYERIRGELNRCYDEHSFSDFLADFLARAGFLSTLYDEWDSVLPFITESVPWQKARNIALFALATYKPVSKNQLEGE

SEQ ID NO: 560 - protein, 301 aa, Cyanothece sp.
MFYLFGTVITHYGPASLNHEKARGNVSPLQKTYWDGHIHSLVSGDAIRWGLRYTLQKEGYPINRRWNEDEFTNDLVNENFDPVEFVDDDLFGYMYAEAAKEDIQEEEPSSTGKERRNQTKGSIVQRLGALGVNRGVSLIPYTGALTFNAKSGKIKDRTALHFLEYHNTRYQYTFALDPNHLKVKERILAFIDALMNIRKVGGNNNVFCYKFTPESFVLCWTQRETPGIFYCFEEGDLIPKMKSEVLEDIEVGDIKASELWIGGRVAKGLKIKNAHIFRGKEQAIEDLKKVIVKDLELSYPY

SEQ ID NO: 561 - protein, 211 aa, Cyanothece sp.
MSSIAVYIDVPFASFRQSHSREYGKTYPVPPPATVYGMLLSLVGEWDVYLHCGVQLAMAMISQPQISKVLRRIRRFKVKNFSDDRNTNPEYQEVLSNIKFIVWVASKNEQAQPTLRERIEQALIYPESVKRVGCLYLGESNDLVNKIKLISNDYCFEERWWLMQDEDGLIILPYWVDHVGSKNTRWLRYGLKKISVEFPPESCWTTIQAIR

SEQ ID NO: 562 - DNA, 580 bp, Cyanothece sp.
cgtcccttttctttgctctctaattctttcattgggacaacaaccataaagtgaccaaactgacaactataagttgaccagagcaattgtcacttaaaggataaagtggccgcttttaaagcataaagtgaccgtccctggaatttagagtaaaagattgcctataagcataattaactggctttagtttttaagaaagagacgatcaccttttgttacggaataagttctagcgcccttgtagtttaggttttagacagcggccactttatcctttaaaaacggccactttttactttaagtaacagcaatccctgaaatgcttagtttttcgttggcgaattcaattgaaaatgtacgcttgacaatcataagttgtccgaaagtccaaaaaacaaccataaggtgtccttgagttccagcgacacaatgtttacactctctacaagacagcaacaagacagcaaccgaagcaagtaattaagaattttttattatttttattaatatttgagcttaagaagatagattaaaattatgtttgccaagcacaattgttaaaaaagggcatttaacgata

SEQ ID NO: 563 - DNA, 270 bp, Cyanothece sp.
gttaggattaaaattaaataactaatttattcttaactcaagtgacatcaataacaacgataagttgtccaccttctttgacaacgataaagtgaccaatttggtcaacttatggttgttgtcccattcatctaaatcggtcgtccaaccgacataatgctgcgcggtatgcttgggagaaatgggacgggcaaaatgcaaaatataaacgtatcccatgatttttactttttaaaaacttcattaagcagcaatgcggagcatgaaatt

SEQ ID NO: 564 - DNA, 274 bp, Cyanothece sp.
tagataacgccattaggcagttagccatgatgcacaatggaacgggcaaaatgtaaaatgtaaacgaatccctgagcaacgccaataggcagtaaaccatgatgtactatgctttattttgctattgatagccaaggaactgttcagtattgagcaacgccaataggcagtaaaccatgatgtacgacgcggtttcagcaactgaggcgggttcagcaacgaatcaagcccgattttcttgagcaacgccaataggcagtcagccatgacgcac

SEQ ID NO: 565 - protein, 396 aa, Stanieria sp.
MSSEREFPLELLKANKEHRLNYYDEYTMAHPFLDRAFEDLKPLVRHCGETRLIFIVGPTGVGKTKLRQLTEKWILEKLWESIRSNMGHLAVASVEAVLQKSGLFNAKDHLKRCLYALHEPEEFIKNKINYGVDGIYRTDEGKLAIKSRILETDLGWALEQALKHRHPQIFFIDEAHHMLAVASGRKLTEVPEAIKSLANRTEVLHGLIGTYDLLTLHDIGDQLSRRSLYIHLPRYDAKFIEDREDWQSIVWNFQTQIPIEEEPDFVSDWEYLYERSLGCVGILKNWTRNAFADAMEDEAKTVTLKHLERRALSIGQCRNILKKIKEGENNYAAIEGEVEKLRTELELGIEPISRTQPISQSYSGANQTASQKPKSKQAVGQRRAKRDRVGIDKDAG

SEQ ID NO: 566 - protein, 455 aa, Stanieria sp.
MQDKIFKKYRSLKLQCTPERSSKLYSITPIGIGNSLIESLTSYISRLALAHCVYPGILMERVVSSVIDKKYSSADIHKLYSFTDAINGTGVMGLDIVNALEKLTFQNRLSLLTLTNLSELIPSRKLLHDYKLWCPQCYRNCHTRSEEIYEPLIWKLKTVAVCSIHNLPLQEFCPYCLKKNYHLAWKTRPGYCSQCGQWLGELKAYDQSLLAKEKDETLNWHLWVSKNLEELLIKNSSRDVTWSKNTISQSLMRYAQQNAEGNIAALARQLEMPKNTVWLWCKGKNQPTLEMLLRICYGLKVSVWNFLTQENLIESEKVHLIASPPELKSKAKSKVLELDKIKEYLEQVIKKETIPPPSMEQVARDLQFQRRTISRHFPELCRVISANYTKHRKATHRQAIESSCQEVREAVKQLHSEGKYPSHNKVEKLISRPGLLRYEEVKKAFTKAKQELNFK

SEQ ID NO: 567 - protein, 340 aa, Stanieria sp.
MAEEGKLNRYKHLIFSNPIDFPETSCLYSLESIAVGTPYTESLSSYLNRLAQEHCVTPQKLIMGEIAPTILGDKYAPEIFSKNVSSLFGNSDAKPAINGMREMTRSLVDALEKLTLRQDLRFLSCVTWKGIISDRGLFRQYKAWCPLCFETWRQARKLIYEPLLWSFREVDFCPEHQCELCDRCPHCDSFQKAISDFSVPGYCSRCRHWLGKSDNTKSSLQEDFKQNHFILQGIGDLIALTPQLKHQPNLKSLKHKFKLILFCFERAIHHDLGQYVVLIKLIEKLKIDLKQNYFKPINLTEIIIPVCQQAKISVSQLFENNYENLAQILAQNIETDYKIL

SEQ ID NO: 568 - protein, 216 aa, Stanieria sp.
MAIAQVGREEQHEEIELIQNPYIELAFPVMGTSLPIDHGYQLYSALKYRLMQLKDWDDISIKTISGKCDRHKRNEINLTNRSKLLVRLPSEKVPFVYSFSGKSLTIGNHKIRLGIPNMNFLQPKSKMRSHIVVIRGYEEPKTFLEAAKRQLDALNIQADIKLISNQDGTPKRKTIAVKQTLVGFGIEANHLSEADSITLQEKGLGGKHKMGCGVFV

SEQ ID NO: 569 - protein, 565 aa, Stanieria sp.
MIVKADEPKIEISLSDPGMTMLHRAGVAGLYMSLKALAKRYPTLKSRQGNFQWTLTKNSISLNWKGNDYEALDWLFSESFQISSDGLISLTGLQSPNWETQLAIHVGIKNTFLQHNQFFRSAEDAIESLTIDNLEVQIEYKKVKSYAHQYYAEQLCPIERLNFKRIFTKLRLFIFIHYTLIGFLFLYEIRQGGNLEQNVVGITGWLYPGATVKHYAYQKETQFTETLERAIALLYAPVACLYFIAPKSYLYDTKTQYCLVIPEITDLKSYPRQRQKLNNWNYQQFLASGYSDAGFRLLTQQATLRILQQNNLKRCQIITFGQTQWTRFQKIRKNVEVIELTDKIIKNYRLCDRYFKNRVVEWEDGNFIAASIVRELIAENLARGFSWWHNFTHTVRSNKLFRLISYEKKGLQQMVKNTDWDEEAQKLFVQACHKALHQIRGKLASKAKEDEYVQFERENERIRSSLIRCQNSEDLRHFLATFWSKAGIISLLSQHWQQLMPLTTKPSNWKLARDLALLALASYTTPEGYKQTSQEEKPKDVEDRKPDQEETSSSTVKTQELSEEE

SEQ ID NO: 570 - protein, 336 aa, Stanieria sp.
MTFYLYGNILTFYGVAANNRGENQGNISTLQKLLWKGETHTKISAEAIRWAIRYYWQKAGYQVNRVWDDEVNDYTWQDPKFNPLDFIDDDLLGFFEAESAKKEPENAPNKSQSENVNNEPQPENAKLENTNQSKSKKKLPKKLKPKGSVTHRKGRLDVTRAISLLPYDGNVTFNAKSGTKTRTSIYGTEFHATRYQFGLGITPESCQDKSRVLALLDALVSICRVGGNHGRFLFDFAPESIVLRWTSDFTPRFLYCFEEDEMDNICTPELLRQIRSGDLEPTEFWISGKIAENLQGSEYSKVNQFSGIKAMVDALKQKIACDLQFCLLDQTNRGEN

SEQ ID NO: 571 - protein, 209 aa, Stanieria sp.
MMIALRVDVPIASFPTSRSREYRETYPVPPPSTVYGMLLSLVGETDRYKHCGVKIALALLSEPAKSITLRKTRRFKSQKIDHKENTRPDFQEILTGIEFIVWIDTGDDLAQPDLCDRITGAFANPGSVQRFGLLCLGESRDLVNSIDLLATTDFEQPLQYLIQDDYGYLSLPYWVDRVGSSKTRWLNYSLEALEVQQPPHSAWTKIQAP

SEQ ID NO: 572 - DNA, 419 bp, Stanieria sp.
aaaaataacgaccgactctaaataaattttgctattaaatgaatagatttattgtcattcctgctttgaggtcgtggctcaagcgttcgtggtcggcaattttgttgggcggacggacattctttttcttatttactcgcaagcttgattgtcactggaagcataacttttcggcaattataaccataatatttccgccatccaatcaaatattgctattttgacgttaattattttgtaaaattttgaccttgtagaagcataacatttctgcaagtcaaaaatagaaacataagctttccgcaggtctatctctcaagatcgagcttctaaattggtttttgttttaggataatatatttttgcagtaacttttttcatctcatcaattcataaacgtagaatcatctcaagagaaa

SEQ ID NO: 573 - DNA, 216 bp, Stanieria sp.
cgcaaagcgagccactgcgtcaacgcacgataccagaaacctttttagttattaactataatatttctatctaagtattgattatcgtgcatcggaagtataagatttccgcagtgcattagaagtataagctttccgtggcggaaaagttatgcttccagtgacaacacaacatttaataattgaatttacaacagatggagctaaccggactcg

SEQ ID NO: 574 - DNA, 253 bp, Stanieria sp.
gggcaaccagattagatgtcgtcaggcgttgtgaacaagagttttaagtatgaattgaaagtgacaggactcgacgggcaaccagattagatgtcgtcaggcgttgtgaacatcaacgagattatccgcagttattgtatccgcaagggcaacaagattagatgtcgtcaggcgttgtgaacggaaattgccccaggggtggcttatcccaagtttgctgtaaccagattagatgtcgtcaggcattgtgaaa

SEQ ID NO: 575 - protein, 922 aa, Cyanothece sp.
MLSDTEFQTWCDGMQLSQRQRELITQVRTSPPIRKVKGSARNVHGRYPSKKMGTTIQFESHTVELPALCEFYEYDDSVLEYWDQPYKFTIKCAPEGRQATTITHYPDFLVLRKNSCGFEEWKKETKLEKLSEKQPYRYQKQEGIWIDTIVGEYLENLGYYYCVRSDREIDWVKYRNQKYLQSYKHGYLDQQYIIDTAVEEELKDIINHNPGIDLTTLLNKAQNATIDDINTLIALEKVYVDLSVVPIEEQLDKVHLFRDKATAEAYITATHNYSEPITGSVQIVNLKVGSSFLLDGKSLTIDHVGDSKIILKGEQGIIRWTHAEFQQLLELGEITHLETEEKPALDEEGWQYFVEASPKALETANQRYSAIKPLLDGETYSSLDIDISARTLRHWKAKYQKAQQDYGCGFLGLIPQSKGNPTPRYSDEDVEFVDKIIEEQYETFKQKNAWQTYLRLRDRWKESGRTSPIPSHTFYYERIKKRNSYQQTKRRMGSRAANNLLRPWLIELTTPRHGSRPFEICHIDHTPLDVECLCPYSNKNLGRPWVTGMIDAYTRRILALYLTFDEPSYRSCMMVMRICVQRFGRFPELIVVDNGKEFSSTYFETLLARFEATKKHRPKDVPKFSSIIERWFGSQNREFINNLRGNTQIMKHVRLVKKENNPKNLATWTLDELYDYLAFGYAYGVYDRMQHPALEGMSPQQAYELGLAKTGHRPHQYIKYDEQFKILTLPTTQKGTAKVIPGTGVRINYQDYWTDEFYRVENQSVPVRYDPLDYGVAYAYINNHWVKCLSNYHLRFQGYSEKAVAIATTICRQKRKQSNQSLYVGANELVSLLKNAEDYEELMLQIRKDQSAKLVYNLIEGNLSSAVLNPADIEHPFLQDDSKVDNNFSNLDEDILQPSLSTTTQSDNEDDDIGFYSNEELW

SEQ ID NO: 576 - protein, 371 aa, Cyanothece sp.
MTEKRLFSWELLEDSTENKLKYFKDVIIPHRNIKTILEQLLKNAIEPDDALVYLVFGVTGVGKSRLKAEFEKRLLRHFEAEIIANPGSLVVGGIEVDGAEGGKFNYSDYYIQVLESLQEVLIDYKENYEIDEDDNEDNLRGDHEGKNSKALRRTMQKVFTHRQLKAYTLDEAQHLFDVAGGRQINVQMNWLKSIANKTQTVHVLFGTYDLLKCQEVNGQVGRRSEDYYLPPYYLDNSDDQKEFKKAINTLQRHFPVENEPELNEKWEYFMEYSIGCIGILKSWWYRALKNALDDGAKTVRIKDFQARELSSGRRKTIKKELEDGERRLAALYFEEKAKKPKSESQASSKSSTRKVGERKAIRDLVGVNQEG

SEQ ID NO: 577 - protein, 329 aa, Cyanothece sp.
MSIYEEFWSSKPLKLPPRSRLFCLKPMGVGTCYTESLSSYVNRLAQEHCLTSQKLIMAEIAPLILKNEDKSDLLKKSVSHLLGNTDAKPVINGMREMTGELVRVLEQLTMRQDLRFLTLLSWKGMIYDRQLFKNYRAWCPCCLEEWKGEKKVIYEPLLWSFKDVEVCLLHKQRLIEECPHCNARLPVFARLSPVGFCSRCRGWLGDKKEEMEEVEPHRVNIEGIGDLIAVTPKMAYKPIPIELTRKLEVILLAFEEACGKDITLLGDLGVIMEQMRIATKQHQNKPYHLVKLVIPVCEKANIRVSELLLLNFKALSDRVFENLELGMRL

SEQ ID NO: 578 - protein, 463 aa, Cyanothece sp.
MDIDINKIQPYTNDELWSPEKFPMPPRSRLHHLQPMGIGTPMVESLTSYVTRLAHSHGVHVGTLIYKEIIPCISKTYKTTNLLCLRNQTGAINGCGLLAEDSVQALSELTLYQNLSNLTMLNWKNIFPNRKLIRNHKAWCPFCYQEWRTNNQIIFDPLIWQIEVIRLCSIHQYSLQTLCPSCKKSVSVLSPKNQLGYCSNCSNWLGNIEDYLNTSLSIHTKFKDKSYFLWIADCLGNLLSFPSTIKSPSKKQISQIIQAIIHQSTKGNIAEFARWANMPKNTVWMWVKGKSLPQLSRLLALCYLCRVDLLDSIINEGNITNMILHQKSIPSSVNERPKIFKNTLNHAQIHAALSEAFQETHPRPMTQVAKRLGISNKVLRRHFPELCKKISQRYLIYKKQSRLERIQKVCIEVEKAVKQLQQQGIYPSEQRVALHIGQPGCFRDKEVREVLNRTRRNWRLLDT

SEQ ID NO: 579 - protein, 221 aa, Cyanothece sp.
MTDTVINSEEHLDMIFKLRGAPIPLDNGYVIYSALCRICPTLHELKDVGIHPIAGIPTQNKFLELTPNSCLKIRIHHLQIPIIYPYLTGQTFEIGQESYQLNIPDYQAIRSSDSLYSRLVVIKGYQDSSSFLEAVQRQMDSLAIQGNVELLTRQNGTPQRRQLTIRKQGNEFKIRGFGVKISELSPEDSLTLQEQGIGGKRKMMCGIFVPATRPKDERKTP

SEQ ID NO: 580 - protein, 515 aa, Cyanothece sp.
MTVATQSKISLSLTACDTTIMHRAGMAGLYLTLKRLEEKYPDFRQREGNLSWSLTPDTIDLFWEAIDFSALDWLLKESFQLDDNGLICLTGLDDYSELRQKIELNEAIKAVFLRHNKFYQAGEAKKISFTVEEREVSYSYKPLIWYAHQTFAKELCDTDTQQLKQDYLQITSWLYLGGIVRHARADKKTKLEEKPEYALALLFVPVVCHYCLFHLPSEDVNSRKPHRYLVVIPEINNFEDASRRRWRLQQLEPQQLHVTNMSEAGLLYYSLDEIQANENYSQACQVWLYEKMNKASYQRVLTMVEEIEIDKEMITTYQQVKQYFQPNYQHIYPNNILIEVNLVRSLIAENLRQKQPWWFNFWKKLIDEDSKNYLFKQLLSNQKGVKFMTKNSERDEKYLAFIEVFQQAMRANFAKIYAKTERGKNPLFQKKAERLRAELNCCYDEISFQHYLADFLARGGLNKPLQGQKREVLLLIQQVPWEKLRIWALLGIASYEPKPKNLQELEGIKDESEEE

SEQ ID NO: 581 - protein, 323 aa, Cyanothece sp.
MNQKKNKIPNYYLYGTVLTRYGLASLSHGMRQGNKSILQKAYWDGKIHSLVGSSSLRWALRFYLQEEGYPVNRVWDKDEHINRLTDDNFNPDQFYDDDIFGFALLESVEEETVEDKTQPSTRRRGKRKKSGTTAQRTGALSMNNAISLTPYDGSLKLGAKSGRDKDSTSLHFTEYHNTRYQYYFGLNATHLKDCSRIFPLIDGIMDMPKVGGSANIFSYPFCPDSLVFQWTNHFASYISYCFESVDGKGRNIKLTQDFINEVECGQINPDELWIGGAIVNDLRELENFEKSLLKQIHLYRNRNELVADLKEVIKQDLGLKDSQ

SEQ ID NO: 582 - protein, 212 aa, Cyanothecesp.
MNTPLVIYLDVPFVTFREFHAREMGRTYPVPPPATVYGMLLSLVGETDVYRHCGVELAIAMLSEAKKSRILRQMRRFKQKDFSHAENVNPSYQEILSNLKCLIWVRSEAEMMQPSLKERIEFTFERPELVRRFGCLFLGESDQLIKTIRLVSEDYREGVRRWLIRDNGGRLTLPYWVDHLGSRNTRFLRYRVEEMNQLSPPDFAWTSIQSSV

SEQ ID NO: 583 - DNA, 627 bp, Cyanothece sp.
tatctaattcggtgggttacggcaaggatgaaaatttattactttttccctaattgataaaaaccctctctcacctatcaattgcattcaaaatctgtttaataattttaggatggagaatttctccagaatgaaaaggaataaccactcgaatattatccttaaaataaattcggtgacttccttgagttcttaataaaataaaaccagcattaaggagtaacttttctgcttctttatcggttaatctcggaaatttaggcaacgttaacctctatactcattgttacaatttctcgattaagtaaattatgtttttccacctctgataaagtagataaatacagttcaatggcttcttgtatattgcgtttgacttcttctaaagtatctccttgactttgacacccttctagttgaggggagtaagcataataaccatcttcatctttttcgataataacactgatttgatacgacatctttgttaactgctagattcattctttcataataacatctctttggggtaaaactacctctatattcttatttcctcacccttctaactcagcaatattatttatttcatattgttcaatattgttttcattttgtttattttcg

SEQ ID NO: 584 - DNA, 121 bp, Cyanothece sp.
actatttgacttaaaatttttcaggcatagctttgctgtcagattttcaggcataaccttgccgatgcggcaaaaacaaactttaaataatagaaagtctcgcagcatctcttaaaatggt

SEQ ID NO: 585 - DNA, 179 bp, Cyanothece sp.
acacctaacggcataaagccacgaatcacgtcagttaattgggacgaaaatccctggatattttccttgagcaacgcctaacggcatgaagccatgaatcacatcgttgagcctctttaacacttagcccgattttttaaggattgagcaacgcctaacggcatgaagccatgaatcac

SEQ ID NO: 586 - protein, 920 aa, Nostoc sp.
MLYDVDFQAWCNSLPLSQQQRDLVNQIRTSPPARKVKGGGRNVHGPYASSKMGRTIQFESHTVELPAMTQFYEYDDQVLEYWDQPIKFSIKCSPQGKQATTISHYPDFFVMRKNCCGFEEWKTEKRLEKLSEEQPYRYQKIEKQWVDVIVQEYIESLGYYYRLRSDSEIDWVKYRNQKYLQPYKQGYLKQQYILNDQVEANVQEIIVNYPGINLTNLFEKAKNATIDDINTLIALEKVYVNLSEVALVEQEKVHLFRDQATAEAYITATHDYCEPVSSNVPIVELKVGSSFLLDGKSLTIDHIGESKIIFRGEQGIIRWTYAEFQQLIELGEISNLQTENHTTLDEEGWQYFLEASPKALETANYRYAAIKHFLGKEADNSQKYDLSERTLRDWRAKYRKAQQKYGCGFIGLIPQYKGNPTPRYSDEDLEFIDTVIEEQYETSKQKNVWQTYEFLKDEWQKVGRISPVPSHTFYYERVKKRNSYQQTKKRMGSRAANNLLGPWLIQPTTPRHGDRPLEIVHIDHTQLDVECICPYSGKNLGRPWVTGMIDAYSRRILALYLTFDNPSYRSCMMAIRICVQRFGRFPEWIVVDNGKEFSSTYFETLLARFEASKKHRPKDFPKFSSIIERWFGSQNTEFINNLRGNTQIMKHVRLVKKANNPKSLAVWNLEELYDYLAFGYAYGVYDKAEHPALEGMSPQKAFELGLAKTGHRPHQYIKYDEQFKILTLPTNNKGMAKVIPGQGIRVNYQNYWTDEFYSVENQCIPVRYDPLDYGVTYAYVNNHWVKCLSNYYMKFQGHSEKAVAIATTICRRKRQIYNQSQYVGSKEIVDLLNNAEEHEELILQIRRDQSAKLVFNLIEGKLSSAVLLNTLNTEQHSYQDSQAIEKNLDLIDLKEESLQPSLPKKFNPDDIKAFAEEELW

SEQ ID NO: 587 - protein, 372 aa, Nostoc sp.
MVTNRRFPQEFLQAPTDNKLKYFKDIIVPHRNIKLVLDQLLKNAIEPDDALVYLVFGVTGVGKSRLKAEFEKRLLKHFADEIISNPGSLVVGGIEVDGAEAGKFNYSNYYIQVLESLKEVLIDYKENYGVDLEDDNSDNLIGDHEGRNSKALRRTIQKVFLHRQLKAYTLDEAQHLFDVAGGRQINVQMNWLKSLANKTQTVHILFGTYELLKCQEVNGQVGRRSEDYYLPPYYLTKPEDQQEFIKVIKTLQQYLPVENEPQLEEHWEYFMKYSIGCVGILKSWWYRALKNALDEGAKTVRMKDFKARELSAGRRRTIQEELKAGESRLANLYTNEQKDENPEFTNSQPEKKGSKVGERKVGRDLVGVNQEG

SEQ ID NO: 588 - protein, 329 aa, Nostoc sp.
MSIYEEIWSPKSLEIPQRSRLFCLEPVAVGTPYTESLSSYLHRLAQAHCLTSQKLVMGEIAPLILKDEDKSELLVKNLSHLLGNSDAKPAINGMREMTGKLVTVLEELTMRRDLRFLTLLSWKGMIYDKGLFRNYRAWCPCCWQEWMQENKTIYEPLLWSFKNVEFCLIHKQRLVEECPRCGSRLPMIAKFSPAGFCSRCYGWLGQEIKGEAEIEKYRVNIQGISELIALTPQLGYKPIPIELTRKLQLILLVFEQAIGKDVKLLGDLGGVMESLRIASTRNQSQPYHLVKLIIPVCEKAKISVSQLFGSDFQELGKTLFGNFSLELKL

SEQ ID NO: 589 - protein, 458 aa, Nostoc sp.
MDIDIIQIQPYFEDELWSPEKFPMLERSRLHHLEPIGIGTPMVESLTSYVTRLAHSHGVFVNILLSRIVNPLLQQTFIKNSTSRGLKPFFNRSHALNGYGIMATDFVDVLNKLTLHNQLELLTLIPFSNILVTKGLLRSHKAWCPICYQHWKQKKQLIYDPLLWSFNDVKICLIHQHTLVQNCPHCHSQLLWLNWKSTLGYCSQCFQWLGGYSKTSVVDRERWIVENLGEFLTNANQLSSVLTQELIPKSFTHVVHKVSGDNIAAFAAMHKIPKNTFWGWYSGKTCPSLFALLQICYNLKISLFQFFTQDFNLSTNHCQNLKLDMKYSNKIRSSPKILDLDHIENTLTSILSQAKDPLPTIAEIAKQLKINRRVISRHFPLLSHQIVVKRRNYMGMCHLAAIEQCCQEIVEAIVSLHQSGEYPTESRVCELISNPGYFRYKKVRLFYKKTVQSILSRL

SEQ ID NO: 590 - protein, 220 aa, Nostoc sp.
VIATAINSEYYLDLTFKLRGAPIPLDNGYAVYSALSRICPSLHELKSIGIHPITGIPTRNNLLELTAQSRLKIRINHQQIPLIYPYLAGQAFHIGQNSYQLDIPDYKPLISSESVYSRLVIIKGFQDSNNFIEAVQRQLDNIGIQGKIELLTRQDGTPQKRQLTINKEEKKFEIRGFGVKISELNPEDSLTLQEQGIGGKRKMMCGIFVPATRSKEEEET

SEQ ID NO: 591 - protein, 511 aa, Nostoc sp.
MVATQPKISLSLGAADTTIIHRVGMTGLYMTLKQLEKQYPSSRQRGGHISWSLTADTIELFWQGSDFVAISWLINESFQLDDTGLIHLAGLDNNAIDLTQKIQIHEGMCAVFLRLNKFYQAGKLVNTELTFEEKKVEYQYKSLTWYAHQTFAEKLCDTDTQQLRQDYVQITSWLYLGGIVRHARTQNTTKLEEKPEYALALLFVPVVCHYCLLHIPSEDLKEKKTHRYLVVIPEIKDFEDASQRRWRLQQLETKQLHVSSLGEAGLLYYSLDDIQPQGDYYQACQVWLYEKMNKDSRQRTLMSIEEIKIDKNTLITYQQIQKYFPTNYQKIQPKQIFIKVNPIRSLIADNLVKGIHWWSNFWEKLVIDDSQGYLFNQLFFNREGFIIMAENSEEDKQYLIFIKVFQQAMKGNFAKMYAKAQEGKDPPIKKKVERLRAELNYCYDELSFKEYLSDFLVRGGLNKYFNQHQEEIVLLIKKIPWQELRIWSLLAIASYKPKNKLTKMNDDSEEE

SEQ ID NO: 592 - protein, 322 aa, Nostoc sp.
MMTQKKNDNNIPNYYLYGTVLTRYGLASLNHDMRRGNKTTLQKGYWNGKIHSFVGSSAIRWALRFYLQQQGYLVNRVWDEDEHINRLTSEDFDPEEFYDDDIFGFALLESAETEEEISTTKRKKKQTKASTLNQRTGALGMNMAVSLTPYDGAVKLGAKSGRDKDSTSLHFTEYHATRYQYYFGIDATHLRDFSRILPLIDGIMNLPKVGGSSNIFNYPFCPDSFVFQWTNNLPSYISYCFEYCEPKSKEARFTQEFIDEVECGQIDPSTLWIGGTIVKELHQLDNFDNSPFKQAHIYRNRNELAEALKAVIKRDLVLEESK

SEQ ID NO: 593 - protein, 212 aa, Nostoc sp.
MTAPLILYVDVPFATFRESHAREMGKTYPVPPPATVYGMLLSLVGETDVYRHCGVELAIAMLSSPKKSRILRQMRRFKNADFSNPENVIPCYQEVLSNLKCLIWIRSDGEKIKPSLRERIQLAFDHPELVRRFGCLFLGESDQLIKTIKLVSQDYLEGVRQWAIKDNRGRLTLPYWVDHVGSRNTRFLRYRIEEMPSSPPPDLAWTMIQSPI

SEQ ID NO: 594 - DNA, 714 bp, Nostoc sp.
ctgggtaggtgtagttatttgtgccgacaatattgatccggaggtcggaattaccagtttcgcaggggctattttctagatgattggagaatagtgtggtgatgcggacagcaatgcggctatgatttacgctgccacctgtcatggcataaacttgaccgttgatcagttcgtgtttttctagttgctgttcttcccaagtgaaatattcttcgggggttagggtggggaagttttctttggttgcgatcatggtggggaaactcctgggttggatgactcgcacacttttatatagaaaaatctctgctgcactttgattttacacaaatagattgatccgtaatgccctacttttcatttaatattgcttgttcatcaaggaaagcttgtaataccaattcacaattcgcaatggacttcgtcccgcttcgctaacgcaattcgcaattgataaatcctgacttgacaaggttttctgggtttcgatctgtatcagaattttagtgaattggtattactgcttgtcgcagacatcgccgatgacccaggttaaaatcccttctcggaagtaatttactgctgtacacaaccaaattttgtgtttctagttcatctaattttccaacttctggtatgtctttgctaaaaaagagacgctgcaatccagcgtctcttctcacgatttattgatcaatctgaacctgatttaat

SEQ ID NO: 595 - DNA, 151 bp, Nostoc sp.
acgaatggaaatggttgataattcacattgattttttcaaaatttttcaggcatgattttgccgttactgttttcaagcatagctttgccgttgcggcaaaatcaaactttaaatcacacgatgataaataatcaatcactgaaaaaatat

SEQ ID NO: 596 - DNA, 108 bp, Nostoc sp.
ttgagcaacgcctaacggcaataagccacgaatcatccagtattgcgggagggtgattcttatccccaaaatttgagcaacgcctaacggcaataagccacgaatcat

SEQ ID NO: 597 - protein, 918 aa, Planktothrix sp.
MLSDTEFQAWCDRLQLSQQQRDWVNQIRTSPPVRKVKGSSRNVHGPYASKKMGRTIQFESHTVELPAIIQFYENDDSVLEYWDQPIKLTIKCSPQGKQATTIAHYPDFFVMKKNRCGFEEWKTEKKLDTLSKEQAYRYQNLEGKWVDIIVQEYIKSLGYYYSLRSDSEIDWVKYRNQKYLQPYKQGYLDQQYILDEQVEFHIKEIIINNPGINLTNLIKKAQNASIDDINTLMALEKVYVDLSAVALIEQDRVHLFRDQATAEAYITATHDYSEPVSSSVQIVDLKVGSSFLLDGKSVTIDHIGESKIILKGEQGIIRWTHAEFQQLVELGEISYLQTKEQTTLDEEGWQQYFIEASPKALEIANQRYQAIKPLLDGESYDSLDCNRPERTLREWKAKYRKAKQEHGVGLVGLIPQYKGNPTPRYSDEDLEFIDKVIEEHYETFKQKNAWQTYLILRDKWEESGLTSPIPSHTFYYERLKKRNSYKQTKRRMGSRAANSLLGPWLIKPTTPRHGDRPLEIVHIDHTQLDVQCVCPYSKKNLGRPWVTGMIDAYSRRILALYLTFDHPSYRSCMMAIRICVQRFGRFPEWIVVDNGKEFQSTYFETLLARFEASKKHRPKDVPKFSSIIERWFGSQNTEFINNLRGNTQIMKHVRLVKKENNPKNLAVWNLEELYDYLAFGYAYGVYDRSEHPALEGMSPQQAFESRLAKTGHRPHQYIKYDEQFKILTLPTNNKGTAKVIPGKGVRINYQDYWSDEFYSVENQSVPVRYDPLDYGIAYAYVNNHWVKCLSNYYMKFQGYSEKAVEIASTVCKRKQQRYNQSQYVGAKEIVDLLNNAEEHEEIMLQIRRDQSAKLVYNLIEGTLSSAVLNSGDIKQPSAPKTKEIEETILDREEEILQPSLSREINLDNIKPFADGDLW

SEQ ID NO: 598 - protein, 373 aa, Planktothrix sp.
MVIANNRPFPLEILHESTDNKLKYFKDVIVPHRNIRLILEQLLKNAIEPDDALVYLVFGVTGVGKSRLKAEFEKRLLKHFQDEIISNPGSLIVGGIEVDSAEGGKFNYSDYYIQVLESLKEVLIDYKENYGIDLENDNEDNLKGDHEGKNAKALRRTMQKVFLHRQLKAYTLDEAQHLFDVAGGRQINVQMNWLKSIANKTQTVHILFGTYELLKCQQVNGQVGRRSEDYYLPPYYLNKVEDQQEFIKVIKTLQQYLPVENAPQLEENWEYFMEYSIGCVGILKSWWYRALKNALDDQAKTVRMKDFKARELSAGRRKKIKEELEAGERLLASLYNDGNLKKIESTASSSPKKGRRVGERKVGRDLVGINQEG

SEQ ID NO: 599 - protein, 329 aa, Planktothrix sp.
MSIYSELWSPKPLEIPQRSRLFCLEPIAVGTPYAESLSSYINRLAQAHCLTSQKLVMGEIAPLILKDEDQSELLSKNLSHLLGNSDAKPAINGMREMTEKLVTVLEELTRRQDLRFLTLLSWKGMIHDQGLFRNYRAWCPCCWEVWKQEKKTVYEPLLWSFKDVEVCLIHKQRLVEVCPHCGSSLPVMARTSPAGFCSRCYGWLGQEIKGEEEIEKYRVNIQGISELIVLTPQLEYQPIPIELTRKLQLISLVFEQAIEKDLKFLGELGGIIESLKIASIQNQNQPYHLVKLIIPVCEKAKISISQLFLLNFKNFVEILFKNFAIELKL

SEQ ID NO: 600 - protein, 460 aa, Planktothrix sp.
MVMDINVAEIQPYTNDELWSPEKFPMPPRSSLHHLEPIGVGTPMVESLTSYMTRLAHSHGVFVSTLLSRVVNPLLQRTFIKNYTSRGLEPFFNRSHTLNGYGTIATDFIEVLNQLTLSNNLKFLTLSPFSNILVTKGLLRPYKAWCPICYKRWKQNQEVIYEPLLWSLNDVKVCLIHQHPLVQNCPHCHRQLLWLNWKSSLGYCSQCSQWLGGSSNTSIVTQQRWIADTLGELVANADRLSSVLTQERIQQSLTYIVHQVSEDNIAAFAAIHKIPKNTFWGWYSGKNRPPLSALTQICYNLKISLFQFLTQDFNLSAIPDRDQKVEMEYCKNTRSSARTLDFNHIENTLSLILSQAGESLPTIAEIAEQLQINRRLLSRHFPDLCHQIVTKRRNYVRMSHLTAIEHCCQEIKEAIALLHQSGEYPTESRVCELISNPGYFRYQKVRLLYKKEVQSMFSRL

SEQ ID NO: 601 - protein, 220 aa, Planktothrix sp.
MTAVSINSEEYLDLSFKLKGAPIPLDNGYPIYAAVSRICPSLHKLDSIGIHPIAGIPTSNNFLELTAQSRLKIRIHHQQIPLIYPYLTGQTFQLGQHSYQLDIPDYKPLTSSESLYSRLVVITGYQDPTTFIQAVQRKLDNLGIRGKIELLTRQDGTPQRRQLTINKQGKQFKVRGFGVKISELSPEDSLTLQEQGIGGKRKMMCGIFVPATRSKEEEEG

SEQ ID NO: 602 - protein, 524 aa, Planktothrix sp.
MIVATQPKISLSLHASDTTIMHRAGITGLYMTLKRLEAQYPSSHQRGAHISWSLTADTIELFWEGTDFVALSWLFKESFQLDDTGLIHLAGLDNDAADLSQKIQIHEGMCAVFLRLNKFYKAGKQVKTELTVEGKKVEYQYKSLTWYAHQTFADKLCETDTQQLKQDYVQITSWLYLGGIVRHARAQNMTKLEEKPEYALALLFVPVICQYWLLHLPSEDLKERKPHRYLVVIPEIKDFEDASQRRWRLQQLETKQLHVSSIGEAGLLYYSLDNIQPEGDYYQACQVWLYEKMNQSSHQRTLMSIEEIEINQNTLITYQRVQQSFQPNYEKIQPQKIFVKVNPIRSLIAENLVKGIPWWSDLWEKLVIEDTKGYLFNQLLYNRGGVIMMAENSEEDEQYLTFVKVFQQAMKGNFAKMYAKAEEGKEPPIKKKVERLRAELNSCYDKLSFQQYLSDFLVRGGLNKYFNENKESILLLIKKSHWEELRIWSLLAIASYKPKEKPNDTENSSSTNNQDLKEVSDESE

SEQ ID NO: 603 - protein, 169 aa, Planktothrix sp.
MNQNNNDDRMPNYYLYGTVLTRYGLASLNHGMRQGNKTILQKGYWNGKIHSFVSSSSIRWALRFYLQKQGYLVNRVWDENEHINRLTSEDFDPEQFYDDDIFGFALLESTETEEGTVTTKTRKKKAKLSSPNQRMGALGMNMAVSLTPYDGTLKLGAKSGREKDSTSLH

SEQ ID NO: 604 - protein, 62 aa, Planktothrix sp.
VECGQIDPDELWIGGPIVAELQQLADFDNSPFKKVHLHRNRNELIDALKTVIKRDLRLEEPK

SEQ ID NO: 605 - protein, 212 aa, Planktothrix sp.
MITPLILYLDVPFVTFRESHAREMGKTYPVPPPATVYGMLLSLVGETDVYRHCGVELAIAMLSNPRKSRILRQMRRFKNLNFSEPENVNPAYQEILSNLKCLIWVRSEGEKIQPSLRERLQLAFDRPELVQRFGCLFLGESDQLIKTIKLVSEDYLEGMRQWVIKDNQCRLTLPYWVDHVGSRNTRFLRYKIEERSSLSPPDLAWTMIRSPI

SEQ ID NO: 606 - DNA, 110 bp, Planktothrix sp.
atctgagcaacgcctaacggcataaagccacgaatcacattaatcggttacggagatcgggttcagcttcgatctgagcaacgcctaacggcataaagccacgaatcaca

SEQ ID NO: 607 - protein, 182 aa, Anabaenopsis circularis
MLHDVEFQAWCNSLRLSQQQRDLVNQIRTSPPARKVKGGGRNVHGPYASSKMGRTIQFESHTVELPAITQFYEYDDQVLEYWDQPIKFSIKCSPQGKQATTISHYPDFFVMRKNCCGFEEWKTEKKLEKLSEEQPYRYQKIERQWVDVIVQEYVESLGYYYRLRSDSEIDWVKYRNQKYLQP

SEQ ID NO: 608 - protein, 350 aa, Anabaenopsis circularis
VLSTKRYRTIREISKPSTAQCNLEHYTLFLLSEPKHGGCSRLAEILGNVSHDSVNRFLLRERYDPYDLFEMVKTIINLTGGILSVDDTVIEKLYSNPKYAELIGYFWSGKYHKSIKGLNLITLYYSDIHGNSVPINYRIYDKKEGKTKNDYFQEMLIEVIDWGVKPRLVTGDSWYSGVENLKFLRNQKLGFLFGVEKNRTVSNEPGNYYQVSSLEIPDEGLVTHLREFGFIKLFRKVFKKEDSRHYILHLPDAEALQEITRSQFVTIHDTHWGIESFHRAIKQVCGICRFMVRDSHAIKTHIFCSLQAFVRLELMRSENIISNWYELQRNLFTLVVRDYIVDNLSNTCAA

SEQ ID NO: 609 - protein, 757 aa, Anabaenopsis circularis
MCCLAHINDIFCQCVSPKPYKQGYLKQQYILNEQVEANVQEIIVNYPGINLTNLLEKAKNATIDDINTLIALEKVYVNLSEVALVEQEKVHLFRDKATAEAYITATHDYCEPVSSNVSIVELKVGSSFLLDGKSLTIDHIGESKIILRGEQGIIRWTYAEFQQLIELGEIINLQTENHTTLDEEGWQYFLEASPKALETANYRYAAIKPFLGKELDNSQKCDLSERTLRDWKAKYRKAQQKYGCGFIGLIPQYKGNPTPRYSDEDLEFIDEVIEEQYETFKQKNVWQTYELLRDKWQKSGRISPLPSHTFYYERVKKRNSYQQTKKRTGSRAANNLLGPWLIRPTTPRHGDRPLEIVHIDHTQLDIECICPYSGQNLGRPWVTGMIDAYSRRILALYLTFDNPSYRSCMMAIRICVQRFGRFPEWIVVDNGKEFSSTYFETLLARFEASKKHRPKDCPKFSSIIERWFGSQNTEFINNLRGNTQIMKHVRLVKKANNPKNLAVWNLEELYDYLAFGYAYGVYDKAEHPALEGMSPHKAFELGLAKTGHRPHQYIKYDEQFKILTLPTNNKGTAKVIPGQGIRVNYQNYWTDEFYSVENQSIPVRYDPLDCGVTYAYVNNHWVKCLSNYYMKFQGHSEKAVAIATTICRRKRQIYNQSQYVGSKEIVDLLNNAEEHEELILQIRRDQSAKLVFNLIEGTLSSAVLLNVSNTEQHSSHDSQKIEENLDLIDLKEEILQPSIPKKFNPDDIQAFAEEELW

SEQ ID NO: 610 - protein, 372 aa, Anabaenopsis circularis
MVANRRFPQELLQATTDNKLKYFKDIIVPHRNIKLVLDQLLKNAIEPDDALVYLVFGVTGVGKSRLKAEFEKRLLKHFADEIISNPGSLVVGGIEVDGAEAGKFNYSNYYIQVLESLKEVLIDYKENYGVDLEDDNSDNLIGDHEGRNSKALRRTIQKVFLHRQLKAYTLDEAQHLFDVAGGRQINVQMNWLKSLANKTQTVHILFGTYELLKCQEVNGQVGRRSEDYYLPPYYLTKPEDQQEFIKVIKTLQQYLPVEVEPQLDEHWEYFMEYSIGCVGILKSWWYRALKNALDERAKTVRMKDFKARELSAGRRKTIQKELEAGESRLAFLYKNEEKIEKPESINSQSLKKGRKVGERKVGRDLVGVNQEG

SEQ ID NO: 611 - protein, 329 aa, Anabaenopsis circularis
MSIDEEIWSPKPPEIPQRSRLFSLKPVAVGNPYAESLSSYLHRLAQAHCLTTQKLVMGEIAPLILKDEDKSELLAKNLSHLLGNSDAKPAINGMREMTTKLVTVLEELTMRQDLRFLTLLSWKGMIYDKGLFRNYRAWCPCCWEEWMQENKNIYEPLLWSFKDVEFCLIHKQRLVEECPHCGSRLPVMARFSPAGFCSRCYRWLGQEIKGEEEIEKYQVNIQGISELIALTPQLGYKPIPIELTRKLQLILLVFEQAIGKDLKLLGDLGGIMESLRIASTTNQSQPYHLVKLIFPVCEKAKISVSQLFESDFQELGKILFGNFSLELKL

SEQ ID NO: 612 - protein, 218 aa, Anabaenopsis circularis
MNFLEIQFALRGKTLPADHGYALYSAVKKLLQESEDESLPNDLPPEVRLCSIPGINDRCGMIYLNRGSRFRLRCPSEQMQTWYRLLQNQVFEIRGHLIRLIQPRITLPEANEILVSRLVTFKLDAIDHADVPRYFLESCQKGLERLEIKGQAFIPSDINGDLARRTIQVKDKKIVGYGVVVEGLSEKDSLKLQWYGLGGRQHFGCGWFYPSQEEPNVN

SEQ ID NO: 613 - protein, 741 aa, Anabaenopsis circularis
MSIKMQTLRPKLLLAKSMEVPWKGAYTLTGHTASVVEAVTTLIDTLGNQLLFQFGLSCCDLAQLRATARLAAYIHDLGKANDHFQAVVRKLKNPMEHPQLIRHEALSVLLAWELRDWLATGDGNFLIAIAAAGGHHLKLGGESGKQTDELGEIRESGVDAWTRGDRILLYTNHQHFIGLLRYGQKACGLASHLPQDLPTSWTIADIKQQRKILLQEFAIWEADSILTAVVKALLVAADSSGSALPVNNVPIQPWIQTQIHYTLTEPELQRVVDERLNGDMLHPFQKDLGNTTSRVTLARAGCGTGKTLGAYNWAKHHAVGRKLFFCYPTTGTSTEGFLDYTHDKVDSTLLHTRAAVDLEHLDLHSTGDEDDLETKLESFKAWSTKVSVCTVDTVLGLLQCNRRPMYCFPAIAQAAFVFDEVHCYDNKLFGALLRFLEVVKAPVLLMSASFLPWQIKAIETAVGEPINIIPGPKELETQPRYRFRLADAPDWERVKAEFEQGGKILWVCNQVNTAIAVYEEAKQYGLQPLLYHSRYKYGDRVNHHREVVDRFKAEGAVMAIATQVAEMSLDLSATLLVSQIADPAGLIQRLGRLNRRYCGHALDALFYPDEKVGFPYSQDELDAGAALIQSFSGEVCQADLALWLEKAAVQGEPDQDSVWLDGEWRTYPASLREAGYTITVLLEQDLKTVEKLPAKLLPRYTVPLIVNSKQTKGWKKCRRYPLAPTEFWGYSSDIGAFQIKS

SEQ ID NO: 614 - protein, 515 aa, Anabaenopsis circularis
MTELVLSIFDPNTLLPHRAGIAGLALALSVIAPTDAPLQWEVTEDAVKLYWDSKDQEAVQWLLEQTYQIKRGLLIAPSLNLDEQGCFTFNQGMLASFLQHGQQKSFVEDPNKPKQGKKKFYKTQTLNFMIEPDSPEISVSYTLLDSCYYTESSKLAKDFSSGKPEVKTQILPGLEECFVNGSYKESSGSFLALLFLPLACGYYQLPNINSKSRSAIVIPEVQNLMEWVKLRKKLPSKTYANFGSSYGKFRASSAGESALRFLLDERQLDDSNLFKVSYCEVYQLGSQPWNANQSYIKQAVYRVPLKDDAINLYRIAYQNLKPKLRPKQDGEGFWLPESRVLAWISDNLISDRAWYVGFFEFRKAATIYLEDRRGLVVMTEHLSPDERILFDAVQGAFKKYRGQQIEQAKRQGRKPDWEQITNKVIYRLQRPSTQQEFAKALVEFLSQFRSKEALSSGPQIFWWLHQEANWRKARDLALLAVATYQGQSTEEKAEIEQDLTEEVTEETTEQTANVL

SEQ ID NO: 615 - protein, 282 aa, Anabaenopsis circularis
MSQHLFATIVTSTAVAANNRGEGDGSTLSTLQKITRGNDQYTTVSAEAIRWGLREYLQNLDSKKVNRTFDPDKDVYNLKNERFSAKDFIDDDLFGYMDAKKGEKNEDATTKRRGALEVSRAISLDPFWGDIAFGSKGGAKGKTSIHSSEVHYTAYQYTIALTPETLKDPIRAALVLDAIGAVRHVGGNHARFLYDFRPESIVIRVTPDPSPWIMDIFKRMDDAVGCPKLLRLVEVRDVAASELIVAGEIADTPYGKQLEALEVKVCRGVKEAIAAAQELLKA

SEQ ID NO: 616 - protein, 227 aa, Anabaenopsis circularis
MTSLLYIECPCTSFPRSFARDYKETYRYPPPSTIYGFLLSLVGEVDMMTHLGVKIAIGIIGDDPPISRIVRKQRHHKFSRAHLGTYPTSKFSKPNHQELLTDLRLVVHLDSSEEQSTIKLTERVAIALSTPEQITRFGGLSLGESWALVNGVRIYRETDGKIRWLVKDNRGLISLPVWIDRTTGQGTFFRFDFSDSFSEASWIQIQMPQLNPKSVRSKPSRLSKKSG

SEQ ID NO: 617 - DNA, 2989 bp, Anabaenopsis circularis
tctatttacgcctactggcatcacaggtttgggcagggcaacaatcaagcaattaacatgaatatggctgctgagtgctcaacgcctactggcatcacaggtttgggcaggactaacatggctcatatcttcaagataactattgcgtgctcaacgcctactggcatcacaggtttgggcagatattgaggccgggaacagaaattgatttatacgggtgctcaacgcctactggcatcacaggtttgggcagagtgcagtgcagaagcgatcgcactcagtattcaagtgctcaacgcctactggcatcacaggtttgggcagttccatgaacgtgtgcgagaaggataccaatggattgtgctcaacgcctactggcatcacaggtttgggcagtaatatccttgacaggcgtatggtataacgccgagtgctcaacgcctactggcatcacaggtttgggcagaaacaatcagatttaaggattttgactactccgggcggtgctcaacgcctactggcatcacaggtttgggcagtttataccctttcttccccgtctctagtccccaaggtgctcaacgcctactggcatcacaggtttgggcaggtaaattacatgaagttgcctttaatgtcttccagtgctcaacgcctactggcatcacaggtttgggcagtccagattcccataattccagttcttcgtcagttggtgctcaacgcctactggcatcacaggtttgggcagaaaagtctgcggaatgggttaaccaagctaaaaaagtgctcaacgcctactggcatcacaggtttgggcaggataggggaggtattgaggaaacagtttgctaaatagtgctcaacgcctactggcatcacaggtttgggcagctaaatattccaatctgtctatgcagcaacgaaatagtgctcaacgcctactggcatcacaggtttgggcaggtctgttgcttcgctgttatcagctaaccaatcatgtgctcaacgcctactggcatcacaggtttgggcagtaagtagtcaacatatttaggaatatcacttggaagtgctcaacgcctactggcatcacaggtttgggcaggacattctcagtggatgatcatcagggaaaagcttatcagtgctcaacgcctactggcatcacaggtttgggcagtacatacaactattgcctaagcagttcgagatactaggtgctcaacgcctactggcatcacaggtttgggcagtcaacgcaaatagtagatgattactcaataataaagtgctcaacgcctactggcatcacaggtttgggcagtgtaaatattggcgcaaccactcccggaacaggcggtgctcaacgcctactggcatcacaggtttgggcagaaagtgttttcaagagaacggggagacggccattatgtgctcaacgcctactggcatcacaggtttgggcagaaaactcttcctcgaagattcaagccattaaaggaatgtgctcaacgcctactggcatcacaggtttgggcagctcttttaattcccaatctgcttcttgtatttcagtgtgctcaacgcctactggcatcacaggtttgggcagttatatataatgactatgcaaaatataaatcttcctctagtgctcaacgcctactggcatcacaggtttgggcagctcacaggctgttttgatctcgttgatagactggttgtgctcaacgcctactggcatcacaggtttgggcaggcagggacggagcttattatcttgtcttgtcctactgtgtgctcaacgcctactggcatcacaggtttgggcagttagagtccgtaagtacgggcttcaattacaaagtgtgctcaacgcctactggcatcacaggtttgggcaggcaatggtgggggcggtggcggcggataatctggctgtgctcaacgcctactggcatcacaggtttgggcagtttatcccccgaagatgaggaatgtactgagaactcgtgctcaacgcctactggcatcacaggtttgggcagaaacctgccattgccgtaaactagtccaccattacgtgctcaacgcctactggcatcacaggtttgggcagaaagtcatcttcccggacaacagcaggagcaactctgtgctcaacgcctactggcatcacaggtttgggcagacgtttgttagccagaactctgaagttcttcgagaaggtgctcaacgcctactggcatcacaggtttgggcagtcgatttgtggttgccgcaccgaacgacagcaaacggtgctcaacgcctactggcatcacaggtttgggcagattttgctctacttgggttgataacactggtaaaccgcaacgtgctcaacgcctactggcatcacaggtttgggcagttcaaggttgtcgttatttggaacgagcttgtcatgtgctcaacgcctactggcatcacaggtttgggcagaagaccaaatatagattcaatctttcctccggaagtgctcaacgcctactggcatcacaggtttgggcagctagggagtaccaaggggtttatgattggtaacagggtgctcaacgcctactggcatcacaggtttgggcaggatgtcgaagcccagttcgagcgcgtcaaaagccgagtgctcaacgcctactggcatcacaggtttgggcagcccaaatgccagggtggaacctcaacattagttccgtgctcaacgcctactggcatcacaggtttgggcagggttagtattaactgttctccgtgccatatatgtatgtgctcaacgcctactggcatcacaggtttgggcagggcaactaggactaggcgatcgcgtgtggatttattgtgctcaacgcctactggcatcacaggtttgggcagaccagtaccagaattcccattcttccgattcacctaagtgctcaacgcctactggcatcacaggtttgggcag

SEQ ID NO: 618 - protein, 900 aa, Tolypothrix sp. PCC 7910
MKEQFEQWVARLQISEAGQKIIEKVRSSEPSRRVGGGSKNVAGRYPSRKMGVTIQFESHRVELPVIYQLEHDEDVLEFYDQPPQIKLDYQASNGRRLGVLHTPDLFVIRTNSAGWEECKTEQDLKKLAQKNPNRYFYSQEDNQWHCPPGEVYADQFGLYYRIRSDKEINWVLQRNLQFLEDYYRSESLGVEQAIAQSLLAIVSSQPGITLAELLHQQTGAKSDDIYTLIVQEQIYFDLNAAPLAEPERCLIFRDEQTASAYRLMVEQPNVSLPAISPVINIATGTPVSWDGKGLNIILVGETEVILGAENDQLIKFKKNVFEELVRQGEITSLQTPEKTDISTESWQRFYQASPEDQAEALERYKTIEPYLNGHPPENETIPARTIRDWKAKYLTALQKYGCGYIGLLSHRSVKGNRQRKLPEDTLAIMERFILEDYETLKQKRMLEVYGALVLACEQSSVIAPSYKAFTKEVKRRTGYEQTKKRQGRRAAYQYESFYWELTQKTPRHGDRPFEIGHIDHTQLDVELVCSRTGRNLGRPWATFLVDAYSRRLLAVYLTFDSPSYRSCLMVLRICVKRHGRLPQIVVVDNGTEFHSVYFETLLATFECTKKQRPPAKARFGSVCERLFGTSNTQFVHNLLGNTQITRNVRQVTKSVNPKNQAVWTLGLLYEYLCAWAYEVYDTDEHPALFQSPRDAFAAGMVTSGSRLHRMIPYDENFQILTLPTTSEGKAKVQVGRGVKINSIYYWSNSFRDPQIENTSVPTRYDPFNIGIAYAFVRGQWVQCISQYYSQLQGRSEKELKLASAELRKRSSNYGRQSQVSAKNLAEFLASVEAQETLLEQRSYDAEAREVFIVIEGGKAATSRNEQPKLIQVPFENTDTQVAEDEAITPETLVVYEEFSL

SEQ ID NO: 619 - protein, 383 aa, Tolypothrix sp. PCC 7910
MTQTNGFPLELLTRPAPERLAYFENYTVGHPRLKEVSEILMRTIAEPAGASFIFVYGPSGVGKTTLRLRVEQKLTELVLPLLESDRGRVPVVGVEAVAPESRNFNWKDYYTRALIALEEPLIDHKFDYGVRGISRDNFGKINVESKVVAPALRRALENALIHRHPDVFFVDEAQHFGKMASGYKLQDQLDCLKSLANMTGILHCLLGTYELLTFRNLSGQLSRRSVDIHFRRYCAENPEDVQAFKSVLLTFQQQMPLAEAPDLVSHWEYFYERTLGCVGILKNWLTRALKDALDREATTVTLKDLQKRAWSVAQCQRMFKEIQEGERQLSETETDIQNLRSALGLGAKPIVLPEETPKTTRPPGKVGKRKPKRDPIGVQQDVS

SEQ ID NO: 620 - protein, 465 aa, Tolypothrix sp. PCC 7910
MLANGLVTYESWDLKQLSIPSRSLLYQLQPVGIRTPMVESLTGYIERLAEAHCIPPDVLISRIITPLLKQIFLKSRTSRDLRSLFDRATAINGTGNIARDLVQALQKLTLIEDLHLLTLLFWCEIIPTRNLFRTQSAWCAVCYEEWSLNNQVIYKPLLWTINSVKVCALHKICLCLQCPHCQQELPLLSWRSRPGYCSKCGGWLGMNLPVKSASELMACSTLSKEELHSQTWIVEVIGELISSTLSFKSPPVKEEIAKSLSLLIDAVTDGNIAEFARLMGIPKNTLWMWQTGKALPVLDILLKICYRLEISLLDLLKPEQLAVKSFTKISHKTFRRSPTLRASPKLFDANQVQDALLAILASDKEPPLTMEEVATGLGYDRRTIFRHFPDLCRAISAKYRSYSKACHTEKIQQSCREVKQIVLKLHHQGEYPSEARVSEIMTNPGYLRYKQVRAALNETRRKIGF

SEQ ID NO: 621 - protein, 335 aa, Tolypothrix sp. PCC 7910
MVNPRGMTIYLEHWNLKPLEIPQRSRLFSLEPVAVGTPYAESLSSYLHRLAQAHCLTSQKLVMGEIAPLILKDEDKSELLSKNLSHLLGNSDAKPTINGMREMTGKLVTILEELTMRQDLRFLTLLSWKGMIYDKGLFRNYRAWCPCCWEEWMRENKTIYEPLLWSFKDVEFCVIHKQRLIEECPHCGSRLPIMAKFSPAGFCSRCYGWLGQEVKGEEEIEKYRVNIQGISELIALTPQLGYEPIPIELTRKLQLILLVFEQAIGKDLNLLGDLGRIMESLRIASKTNQNQPYHLVKLIIPVCEKAKISVSQLFGLDFQELGKILFGNFSLELKL

SEQ ID NO: 622 - protein, 220 aa, Tolypothrix sp. PCC 7910
MAALLIQSEEYVDLTFKLRGAPIPLDNGYVIYSALSRICPILHELDNIGIHPIAGIPTRNNLLELTAQSRLKVRIHHQQIPLIYPYLAGQTFHIGQNSYQLDIPDYKPLISSESVYSRLVIITGFQEPTNFIEAVQRKLDNKGIQGKIELLTRQDGTPQKRQLTINKQGKQFKVRGFGVRISELNPEDSLTLQEQGISGKRKMMCGIFVPATRSKEEEET

SEQ ID NO: 623 - protein, 525 aa, Tolypothrix sp. PCC 7910
MVATQPKISLSLDAADTTIMHRVGMAGLYMTLKRLEKQYPSSRQRGGHISWSLTADTIELFWQGSDFVALSWLIKESFQLDDTGLIHLTGLDNDAINLSQKIHIHEGICAVFLRLNKFYQAGEIVNTELTVEEKKVEYQYKSLTWYAHQAFAEKLCEADTQQLRHDYVQITSWLYLGGIVRHARTQNTTKLEEKPEYALALLFVPVVCHYCLLHIPSEDLKEKKPHRYLVVIPEIKDFEDASQRRWRLQQLETKQLHVSSLGEAGLLYYSLDDIQPEGDYYQACQVWLYEKMNQASRQRTLMSIEEIEIDKNTLITYQQVQKYFQPNYQKIEYKQIFIKVNPIRSLIADNLVTGIHWWSNFWEKLVIEDSKEYLFNQIFPNREGFIRMAENSEEDKHYLIFIKVFQQAMKGNFAKMYAKAEDGKDPPIKKKVERLRAELNYCYDELSFKEYLSDFLVRGGLNKYLNQNQAEILLLIKKLPWQELRIWALLAIASYKPKEKPISKDDSLTLNNQQLEEMNDESEEE

SEQ ID NO: 624 - protein, 322 aa, Tolypothrix sp. PCC 7910
MMSQKKNDNNIPNYYLYGTVLTRYGLASLNHDMRRGNKTTLQKGYWNGKIHSFVGSSAIRWALRFYLQKQGYLVNRVWDEDEHINRLTNEDFDPEQFYDDDIFGFALLESAEIEEETSTTKRKKKQTKTSTPHQRMGALAMNMAVSLTPYDGAVKLGAKSGREKDSTSLHFTEYHATRYQYYFGINATHLKDFSRILPVIDGIMNLPKVGGNSNIFNYPFCPDSLVLQWTNNFASYISYCFEYCDPQSKEAKFTQEFIDEVECGQIEPSQLWIGGTIVKDLQQLDNFDDSPFKKAHIYRNRNELIENLKTVITRNLGLEESK

SEQ ID NO: 625 - protein, 212 aa, Tolypothrix sp. PCC 7910
MTAPLILYLDVPFATFRESHAREMGKTYPVPPPATVYGMLLSLVGETDVYRHCGVELAIAMLSIPKKSRILRQMRRFKNADFSHPENVIPCYQEILSNLKCLIWVRSEGEKIQPSLRERIQLALDHPELVRRFGCLFLGESDQLIKSIKLVSQDYLQGVRQWVIRDNRGWLTLPYWVDHVGSRNTRFLRYRIEEIPSSPPPDLAWTMIQSPI

SEQ ID NO: 626 - RNA, 209 nt, Tolypothrix sp. PCC 7910
ugguucgaauccaguuacguccauugcuauugguagagugacuaaaauuauuuaugugacuuuacccauaacuuugccgcaacggcaagcuuaugguuccaauagagggcggcaaaguuaugcuuccaauuuuccauauguagagaaagaagcuaacuaagucuacccuuuuuaaguuuauagcuuuagaauccaauuuuacgucgugu

SEQ ID NO: 627 - RNA, 735 nt, Tolypothrix sp. PCC 7910
uuguucgcaauguucucaaugguuaagaggauauuauacuacuucaguaguuacucagaacagcucgauagccgaaagucucuacccuauaccagcaugaaccgcuuuugcuccauucucaaaaaaucccgcgcuuuccugcuuucuaugcuugcuuggacucacggcaagcuuauccuuccaauuuggacuggcggcaaauuuaugguuccaaacuguuaauuacauccaaaauuagcugacgcaagaaugagaguuuuaguguuguugacggcaaaguuaugguuccaguagcggcaagcuuaugggugaagucgcaauuuaucaagguuuagcuuguguuuuaaaucuuccaucuguuguuugauauaaucuggcacuggugcaacuucauccugugguuguugcguuuuaggcgcgcuagauacuugugguaacgauuuagcaucuuucucagcacacuggcaauaaacaguuaugaaauacuuuucuaacugguuaagucgguacucuucugcuuucuuagucuacagaaguacaaauuuauuuaucuccaucugccuacaucuucuuguaucggcguuugauuuauucuuuccauaccucgccaacaagggaaucacuagaucccuuaauaaauaucaaauagauaaaaauauaacaaauuuuauucuaucguuuggguauuuuuccaaucauaucuuauuguuuaaauugcaagcauuugcgaauaag

SEQ ID NO: 628 - RNA, 324 nt, Tolypothrix sp. PCC 7910
gugauucguggcuugaugccguuaggcguugcucaacagauuuaugguugaauguugaacccauuagccagcaggugauucguggcuugaugccguuaggcguugcucaaucugaacaggacuuagugggauuuguugauuucuuggugauucguggcuugaugccguuaggcguugcucaagauuuaguugauuugguagagacuuuuugugauugggugauucguggcuugaugccguuaggcguugcucaaaauuguauaauuuggggacaaaggucaaaaccaagugauucguggcuugaugccguuaggcguugcucaa

SEQ ID NO: 629 - DNA, 99 bp, Artificial Sequence
  Synthetic
tattggaagcataagcttgccgttgcggcaaagttatgggtaaagtcacacaaggatacccaggaattgaactcagctctgcaccaagcagacctaata

SEQ ID NO: 630 - DNA, 96 bp, Artificial Sequence
  Synthetic
gatctgcataagcttgccgttgcggcaaagttatgggtaaagtcacacaaggatatccaggaattgaactcagctctgcaccaaccggacctaata

SEQ ID NO: 631 - DNA, 96 bp, Artificial Sequence
  Synthetic
gatctgcataagcttgccgttgcggcaaagttatgggtaaagtcacacaaggatacccaggaattgaactcagctctgcaccaagtggacctaata

SEQ ID NO: 632 - DNA, 96 bp, Artificial Sequence
  Synthetic
gatctgcataagctcgccgttgcggcaaacttatgggtaaagtcacacaaggatacccaagaattgaactcagctctgcaccaagtggacctaata

SEQ ID NO: 633 - DNA, 96 bp, Artificial Sequence
  Synthetic
gatctgcataagcttgccgttgcggcaaagttatgggtaaagtcacacaagggtatccaggaattgaactcagctctgcaccaagcggacctaata

SEQ ID NO: 634 - DNA, 96 bp, Artificial Sequence
  Synthetic
gatctgcataagcttgccgttgcggcaaagttatgggtaaagtcacacaaggatacccaggaattgaactcagctctgcaccaagcagacctaata

SEQ ID NO: 635 - DNA, 96 bp, Artificial Sequence
  Synthetic
gatctgcataagcttgccgttgcggcaaagttatgggtaaagtcacacaaggatatccaggaattgaactcagctctgcaccaaacagacctaata

SEQ ID NO: 636 - DNA, 96 bp, Artificial Sequence
  Synthetic
gatctgcataagcttgccgttgcggcaaagttatgggtaaagtcacataaggagacccaggaattgaactcagctctgcaccaagtggacctaata

SEQ ID NO: 637 - DNA, 96 bp, Artificial Sequence
  Synthetic
gatctgcataagcttgccgttgcggcaaagttatgggtaaagtcacacaaggatatccaggaattgaactcagctctgcaccaagcagacctaata

SEQ ID NO: 638 - DNA, 96 bp, Artificial Sequence; identical to SEQ ID NO: 634
  Synthetic

SEQ ID NO: 639 - DNA, 96 bp, Artificial Sequence; identical to SEQ ID NO: 634
  Synthetic

SEQ ID NO: 640 - DNA, 96 bp, Artificial Sequence; identical to SEQ ID NO: 634
  Synthetic

SEQ ID NO: 641 - DNA, 96 bp, Artificial Sequence
  Synthetic
gatctgcataagcttgccgttgcggcaaagttatgggtaaagtcacaccttggccccctgcacttgaactcagctctgcaccaggcggacctaata

SEQ ID NO: 642 - DNA, 96 bp, Artificial Sequence
  Synthetic
gatctgcataagcttgccgttgcggcaaagttatgggtaaagtcacacaaggatacccaggaattgaactcagctctgcaccaagcggacctaata

SEQ ID NO: 643 - DNA, 97 bp, Artificial Sequence
  Synthetic
gatctgcataagcttgccgttgcggcaaagttatgggtaaagtcacaacaaggatacccaggaattgaattcagctctgcaccatgcggacctaata

SEQ ID NO: 644 - DNA, 96 bp, Artificial Sequence; identical to SEQ ID NO: 642
  Synthetic

SEQ ID NO: 645 - DNA, 96 bp, Artificial Sequence; identical to SEQ ID NO: 634
  Synthetic

SEQ ID NO: 646 - DNA, 95 bp, Artificial Sequence
  Synthetic
gatctgcataagcttgccgttgcggcaaacttatgggtaaagtcacaaaggatacccaggaattgaactcagctctgcaccaagcagacctaata

SEQ ID NO: 647 - DNA, 97 bp, Artificial Sequence
  Synthetic
gatctgcataagcttgccgttgcggcaaacgttatgggtaaagtcacacaaggatacccaggaattgaactcagctctgcaccaagtggacctaata

SEQ ID NO: 648 - DNA, 96 bp, Artificial Sequence
  Synthetic
gatctgcataagcttgccgttgcggcaaagttatgggtaaagtcacacaaggacacccaagaattgaactcagctctgcaccaagcagacctaata

SEQ ID NO: 649 - DNA, 96 bp, Artificial Sequence
  Synthetic
gatctgcataagcttgccgttgcggcaaagttatgggtaaagtcacacaaggatacccaggaattgaactcagctctgcacaaagcagacctaata

SEQ ID NO: 650 - DNA, 76 bp, Artificial Sequence
  Synthetic
caacattagacagatcaacgagacagaaagtcaatgtgactttacccataactttgccgttactggaaccataact

SEQ ID NO: 651 - DNA, 81 bp, Artificial Sequence
  Synthetic
caacattagacagatcaatgagacagaaagtcaacaaggtgtgactttacccataactttgccgttactggaaccataact

SEQ ID NO: 652 - DNA, 81 bp, Artificial Sequence
  Synthetic
caacattagacagatcaatgacacagaaagttaacaaggtgtgactttacccataactttgccgttactggatccatacct

SEQ ID NO: 653 - DNA, 81 bp, Artificial Sequence
  Synthetic
caacattagacagatcaacgagacagaaagtcaacaaggtgtgactttacccataactttgccgttactggaaccataact

SEQ ID NO: 654 - DNA, 81 bp, Artificial Sequence
  Synthetic
caacattagacagatcaacgagacggaaagttaacaaggtgtgactttacccataactttgccgttactggaaccataact

SEQ ID NO: 655 - DNA, 81 bp, Artificial Sequence
  Synthetic
caacattagacagatcaacgagacagaaagttaacaaggtgtgactttacccataactttgccgttactggaaccataact

SEQ ID NO: 656 - DNA, 81 bp, Artificial Sequence
  Synthetic
caacattagatagatcaacgagacagaaagtcaacaaggtgtgactttacccataactttgccgttactggaaccataact

SEQ ID NO: 657 - DNA, 81 bp, Artificial Sequence; identical to SEQ ID NO: 656
  Synthetic

SEQ ID NO: 658 - DNA, 81 bp, Artificial Sequence; identical to SEQ ID NO: 653
  Synthetic

SEQ ID NO: 659 - DNA, 81 bp, Artificial Sequence; identical to SEQ ID NO: 653
  Synthetic

SEQ ID NO: 660 - DNA, 81 bp, Artificial Sequence; identical to SEQ ID NO: 653
  Synthetic

SEQ ID NO: 661 - DNA, 81 bp, Artificial Sequence
  Synthetic
caacattagacagatcaacgagacagaaagttagcaaggtgtgactttaccaataactttgccgttactggaaccataact

SEQ ID NO: 662 - DNA, 81 bp, Artificial Sequence; identical to SEQ ID NO: 653
  Synthetic

SEQ ID NO: 663 - DNA, 81 bp, Artificial Sequence
  Synthetic
caacattagacagatcaacgagacagaaagttaacaagttgtgactttacccataactttgccgttactggaaccataact

SEQ ID NO: 664 - DNA, 81 bp, Artificial Sequence
  Synthetic
caacattacacagatcaacgagacagaaagtcaacaaggtgtgactttacccataactttgccgttactggaaccataact

SEQ ID NO: 665 - DNA, 81 bp, Artificial Sequence
  Synthetic
caacattaaacagatcaatgagatagaaagttaacaaggtgtgactttacccataactttgccgttactggaaccataact

SEQ ID NO: 666 - DNA, 76 bp, Artificial Sequence
  Synthetic
caacattagacagatcaacgagacagaaagtcaaggtgactttacccataactttgccgttactggaaccataact

SEQ ID NO: 667 - DNA, 81 bp, Artificial Sequence
  Synthetic
caatattagacagatcaacgagacagaaagtcaacaaggtgtgactttacccataactttgccgttactggaaccataact

SEQ ID NO: 668 - DNA, 81 bp, Artificial Sequence; identical to SEQ ID NO: 653
  Synthetic

SEQ ID NO: 669 - DNA, 81 bp, Artificial Sequence
  Synthetic
caacattagacagatcaacgagacagaaagtcaagaaggtgtgactttacccataactttgccgttactggaaccataact

SEQ ID NO: 670 - DNA, 81 bp, Artificial Sequence; identical to SEQ ID NO: 667
  Synthetic

SEQ ID NO: 671 - DNA, 57 bp, Artificial Sequence
  Synthetic
ttgccgttgcggcaaagttatgggtaaagtcacactaatagacatctacagaactct

SEQ ID NO: 672 - DNA, 57 bp, Artificial Sequence; identical to SEQ ID NO: 671
  Synthetic

SEQ ID NO: 673 - DNA, 57 bp, Artificial Sequence; identical to SEQ ID NO: 671
  Synthetic

SEQ ID NO: 674 - DNA, 57 bp, Artificial Sequence; identical to SEQ ID NO: 671
  Synthetic

SEQ ID NO: 675 - DNA, 57 bp, Artificial Sequence; identical to SEQ ID NO: 671
  Synthetic

SEQ ID NO: 676 - DNA, 57 bp, Artificial Sequence; identical to SEQ ID NO: 671
  Synthetic

SEQ ID NO: 677 - DNA, 57 bp, Artificial Sequence; identical to SEQ ID NO: 671
  Synthetic

SEQ ID NO: 678 - DNA, 57 bp, Artificial Sequence; identical to SEQ ID NO: 671
  Synthetic

SEQ ID NO: 679 - DNA, 57 bp, Artificial Sequence; identical to SEQ ID NO: 671
  Synthetic

SEQ ID NO: 680 - DNA, 57 bp, Artificial Sequence; identical to SEQ ID NO: 671
  Synthetic

SEQ ID NO: 681 - DNA, 57 bp, Artificial Sequence
  Synthetic
  misc_feature (55)..(55): n is a, c, g, or t
ttgccgttgcggcaaagttatgggtaaagtcacactaatagacatctacagaacnct

SEQ ID NO: 682 - DNA, 57 bp, Artificial Sequence; identical to SEQ ID NO: 671
  Synthetic

SEQ ID NO: 683 - DNA, 57 bp, Artificial Sequence; identical to SEQ ID NO: 671
  Synthetic

SEQ ID NO: 684 - DNA, 57 bp, Artificial Sequence; identical to SEQ ID NO: 671
  Synthetic

SEQ ID NO: 685 - DNA, 57 bp, Artificial Sequence; identical to SEQ ID NO: 671
  Synthetic

SEQ ID NO: 686 - DNA, 57 bp, Artificial Sequence; identical to SEQ ID NO: 671
  Synthetic

SEQ ID NO: 687 - DNA, 57 bp, Artificial Sequence; identical to SEQ ID NO: 671
  Synthetic

SEQ ID NO: 688 - DNA, 57 bp, Artificial Sequence; identical to SEQ ID NO: 671
  Synthetic

SEQ ID NO: 689 - DNA, 117 bp, Artificial Sequence
  Synthetic
attagacagatcaacgagacagaaagtcaacaaggatacccaggaattgaactcagctctgcaccaagcagactgtgactttacccataactttgccgttactggaaccataacttt

SEQ ID NO: 690 - DNA, 122 bp, Artificial Sequence
  Synthetic
attagacagatcaacgagacagaaagtcaacaaggatacccaggaattgaactcagctctgcaccaagcagacctaattgtgactttacccataactttgccgttactggaaccataacttt

SEQ ID NO: 691 - DNA, 122 bp, Artificial Sequence; identical to SEQ ID NO: 690
  Synthetic

SEQ ID NO: 692 - DNA, 122 bp, Artificial Sequence; identical to SEQ ID NO: 690
  Synthetic

SEQ ID NO: 693 - DNA, 122 bp, Artificial Sequence; identical to SEQ ID NO: 690
  Synthetic

SEQ ID NO: 694 - DNA, 122 bp, Artificial Sequence
  Synthetic
attagacagatcaacgagacagaaagtcaacaaggatacccaggaattgaactcagctctgcatcaagcggacctaattgtgactttacccataactttgctgttactggaaccataacttt

SEQ ID NO: 695 - DNA, 122 bp, Artificial Sequence; identical to SEQ ID NO: 690
  Synthetic

SEQ ID NO: 696 - DNA, 122 bp, Artificial Sequence
  Synthetic
attagacagatcaacgagacagaaagttaacaaggatacccaggaattgaactcagctctgcaccaagcagacctaattgtgactttacccataactttgccgttactggaaccataacttt

SEQ ID NO: 697 - DNA, 122 bp, Artificial Sequence
  Synthetic
attagacagatcaacgagacagaaagtcaacaaggatacccaggaattgaactcagctctgcaccaagcggacctaattgtgactttacccataactttgccgttactggaaccataacttt

SEQ ID NO: 698 - DNA, 122 bp, Artificial Sequence
  Synthetic
attagacagatcaacgagacagaaagtcaacaaggatacccaggaattgaactcagctctgcaccaagtggacctaattgtgactttacccataactttgccgttactggaaccataacttt

SEQ ID NO: 699 - DNA, 122 bp, Artificial Sequence
  Synthetic
attagacagatcaacgagacagaaagtcaacaaggatacccaggaattaaactcagctctgcaccaagcggacctaattgtgactttacccataactttgccgttactggaaccataacttt

SEQ ID NO: 700 - DNA, 122 bp, Artificial Sequence
  Synthetic
attagacagatcaatgagacagaaagtcaacaaggatacccaggaattgaactcagctctgcaccaagcagacctaattgtgactttacccataactttgccgttactggaaccataacttt

SEQ ID NO: 701 - DNA, 122 bp, Artificial Sequence; identical to SEQ ID NO: 697
  Synthetic

SEQ ID NO: 702 - DNA, 122 bp, Artificial Sequence; identical to SEQ ID NO: 690
  Synthetic

SEQ ID NO: 703 - DNA, 122 bp, Artificial Sequence; identical to SEQ ID NO: 690
  Synthetic

SEQ ID NO: 704 - DNA, 122 bp, Artificial Sequence; identical to SEQ ID NO: 697
  Synthetic

SEQ ID NO: 705 - DNA, 122 bp, Artificial Sequence; identical to SEQ ID NO: 690
  Synthetic

SEQ ID NO: 706 - DNA, 122 bp, Artificial Sequence; identical to SEQ ID NO: 690
  Synthetic

SEQ ID NO: 707 - DNA, 146 bp, Artificial Sequence
  Synthetic
ggacatcgatgtcacctccaatgactagggtgggcaaccacaaacccacgagggcagagtgctgcttgctgctggccaggcccctgtgtgactttacccataactttgccgcaacggcaagcttatgcagatcggaagagcacacg

SEQ ID NO: 708 - DNA, 149 bp, Artificial Sequence
  Synthetic
ggacatcgatgtcacctccaatgactagggtgggcaaccacaaacccacgagggcagagtgctgcttgctgctggccaggcccctgtgtgactttacccataactttgccgcaacggcaagcttatgcttccaataaagggtggcaagg

SEQ ID NO: 709 - DNA, 146 bp, Artificial Sequence; identical to SEQ ID NO: 707
  Synthetic

SEQ ID NO: 710 - DNA, 146 bp, Artificial Sequence; identical to SEQ ID NO: 707
  Synthetic

SEQ ID NO: 711 - DNA, 146 bp, Artificial Sequence; identical to SEQ ID NO: 707
  Synthetic

SEQ ID NO: 712 - DNA, 146 bp, Artificial Sequence; identical to SEQ ID NO: 707
  Synthetic

SEQ ID NO: 713 - DNA, 146 bp, Artificial Sequence; identical to SEQ ID NO: 707
  Synthetic

SEQ ID NO: 714 - DNA, 146 bp, Artificial Sequence; identical to SEQ ID NO: 707
  Synthetic

SEQ ID NO: 715 - DNA, 146 bp, Artificial Sequence; identical to SEQ ID NO: 707
  Synthetic

SEQ ID NO: 716 - DNA, 146 bp, Artificial Sequence; identical to SEQ ID NO: 707
  Synthetic

SEQ ID NO: 717 - DNA, 146 bp, Artificial Sequence; identical to SEQ ID NO: 707
  Synthetic

SEQ ID NO: 718 - DNA, 146 bp, Artificial Sequence; identical to SEQ ID NO: 707
  Synthetic

SEQ ID NO: 719 - DNA, 146 bp, Artificial Sequence; identical to SEQ ID NO: 707
  Synthetic

SEQ ID NO: 720 - DNA, 146 bp, Artificial Sequence; identical to SEQ ID NO: 707
  Synthetic

SEQ ID NO: 721 - DNA, 146 bp, Artificial Sequence; identical to SEQ ID NO: 707
  Synthetic

SEQ ID NO: 722 - DNA, 146 bp, Artificial Sequence; identical to SEQ ID NO: 707
  Synthetic

SEQ ID NO: 723 - DNA, 146 bp, Artificial Sequence; identical to SEQ ID NO: 707
  Synthetic

SEQ ID NO: 724 - DNA, 146 bp, Artificial Sequence; identical to SEQ ID NO: 707
  Synthetic

SEQ ID NO: 725 - DNA, 146 bp, Artificial Sequence; identical to SEQ ID NO: 707
  Synthetic

SEQ ID NO: 726 - DNA, 146 bp, Artificial Sequence; identical to SEQ ID NO: 707
  Synthetic

SEQ ID NO: 727 - DNA, 146 bp, Artificial Sequence; identical to SEQ ID NO: 707
  Synthetic

SEQ ID NO: 728 - DNA, 149 bp, Artificial Sequence
  Synthetic
ggcatacgagattcgctacagtgactggagttcagacgtgtgctcttccgatctgcaaagttatggttccagtaacggcaaagttatgggtaaagtcacaccctgcgtgggcccaagctggactctggccactccctggccaggctttg

SEQ ID NO: 729 - DNA, 144 bp, Artificial Sequence
  Synthetic
caatttcatccaaaattagctgacgcaagaatgagggttgtagtgttgttgacggcaaagttatggttccagtaacggcaaagttatgggtaaagtcacacgtgggcccaagctggactctggccactccctggccaggctttg

SEQ ID NO: 730 - DNA, 149 bp, Artificial Sequence; identical to SEQ ID NO: 728
  Synthetic

SEQ ID NO: 731 - DNA, 149 bp, Artificial Sequence; identical to SEQ ID NO: 728
  Synthetic

SEQ ID NO: 732 - DNA, 149 bp, Artificial Sequence; identical to SEQ ID NO: 728
  Synthetic

SEQ ID NO: 733 - DNA, 149 bp, Artificial Sequence; identical to SEQ ID NO: 728
  Synthetic

SEQ ID NO: 734 - DNA, 149 bp, Artificial Sequence; identical to SEQ ID NO: 728
  Synthetic

SEQ ID NO: 735 - DNA, 149 bp, Artificial Sequence; identical to SEQ ID NO: 728
  Synthetic

SEQ ID NO: 736 - DNA, 149 bp, Artificial Sequence; identical to SEQ ID NO: 728
  Synthetic

SEQ ID NO: 737 - DNA, 149 bp, Artificial Sequence; identical to SEQ ID NO: 728
  Synthetic

SEQ ID NO: 738 - DNA, 149 bp, Artificial Sequence; identical to SEQ ID NO: 728
  Synthetic

SEQ ID NO: 739 - DNA, 149 bp, Artificial Sequence; identical to SEQ ID NO: 728
  Synthetic

SEQ ID NO: 740 - DNA, 149 bp, Artificial Sequence; identical to SEQ ID NO: 728
  Synthetic

SEQ ID NO: 741 - DNA, 149 bp, Artificial Sequence; identical to SEQ ID NO: 728
  Synthetic

SEQ ID NO: 742 - DNA, 149 bp, Artificial Sequence; identical to SEQ ID NO: 728
  Synthetic

SEQ ID NO: 743 - DNA, 149 bp, Artificial Sequence; identical to SEQ ID NO: 728
  Synthetic

SEQ ID NO: 744 - DNA, 149 bp, Artificial Sequence; identical to SEQ ID NO: 728
  Synthetic

SEQ ID NO: 745 - DNA, 149 bp, Artificial Sequence; identical to SEQ ID NO: 728
  Synthetic

SEQ ID NO: 746 - DNA, 149 bp, Artificial Sequence; identical to SEQ ID NO: 728
  Synthetic

SEQ ID NO: 747 - DNA, 149 bp, Artificial Sequence; identical to SEQ ID NO: 728
  Synthetic

SEQ ID NO: 748 - DNA, 43 bp, Artificial Sequence
  Synthetic
  misc_feature (1)..(6): n is a, c, g, or t
nnnnnngagaagtcatttaataaggccactgttaaacgtagat

SEQ ID NO: 749 - RNA, 72 nt, Artificial Sequence
  Synthetic
  misc_feature (8)..(44): n is a, c, g, or u
uugagcannnnnnnnnnnnnnnnnnnnnnnnnnnnnnnnnnnnngugcuuuaacauuagaugucguuaggcg

SEQ ID NO: 750 - DNA, 42 bp, Artificial Sequence
  Synthetic
aatgagaagtcatttaataaggccactgttaaacgtagatat

SEQ ID NO: 751 - DNA, 20 bp, Artificial Sequence
  Synthetic
gacgcgctggtgtggaggaa

SEQ ID NO: 752 - DNA, 20 bp, Artificial Sequence
  Synthetic
tttgtctacagctgggctac

SEQ ID NO: 753 - DNA, 30 bp, Artificial Sequence
  Synthetic
aatttagcaaaatcagtgactgtggaataa

SEQ ID NO: 754 - DNA, 30 bp, Artificial Sequence
  Synthetic
aatttagcaaaatcagtgactttggaataa

SEQ ID NO: 755 - DNA, 30 bp, Artificial Sequence
  Synthetic
aatttagcaaaatcagtgaatgtggaataa

SEQ ID NO: 756 - DNA, 30 bp, Artificial Sequence
  Synthetic
aatttagcaacatcagtgactgtggaataa

SEQ ID NO: 757 - DNA, 30 bp, Artificial Sequence
  Synthetic
aatttagcacaatcagtgactgtggaataa

SEQ ID NO: 758 - DNA, 30 bp, Artificial Sequence
  Synthetic
aatttagaaaaatcagtgactgtggaataa

SEQ ID NO: 759 - DNA, 30 bp, Artificial Sequence
  Synthetic
actttagcaaaatcagtgactgtggaataa

SEQ ID NO: 760 - DNA, 30 bp, Artificial Sequence
  Synthetic
aatttagcaaaatcagtgaatttggaataa

SEQ ID NO: 761 - DNA, 30 bp, Artificial Sequence
  Synthetic
aatttagcaccatcagtgactgtggaataa

SEQ ID NO: 762 - DNA, 30 bp, Artificial Sequence
  Synthetic
actttagaaaaatcagtgactgtggaataa

SEQ ID NO: 763 - DNA, 30 bp, Artificial Sequence
  Synthetic
actttagaaccatcagtgaatttggaataa

SEQ ID NO: 764 - DNA, 30 bp, Escherichia coli
aacctggcaaaatcggttacggttgagtaa

SEQ ID NO: 765 - DNA, 215 bp, Artificial Sequence
  Synthetic
gatcagccaaggaatcttgctaagagcgttactgttgagtagtgttgaatcgagaaatattgaggttgtggaaacataataaagttgtacaataaataataaagttgtacaatgcctaataaagttatacaatttctcctatgggtgagtataattccatctgtaggagattgtctttatggctagaaccaagcaagagtggacgcaacgctaag

SEQ ID NO: 766 - DNA, 210 bp, Artificial Sequence
  Synthetic
gatcagcctcgcaacctggccaagtcggtaactgttgaataattagtttagttattgtgataacactgtgataacacaataaagtcgtatactaaataataaagttgtatactgactaataaagttgtatactattgtctgtgagtgtttacttagcatttgcagatttttcatatggtcacaagcaaaagagactggacagaagagaaa

SEQ ID NO: 767 - DNA, 212 bp, Artificial Sequence
  Synthetic
gatcagcccagaaatttagctaaaagtgttacagttgaatcattatggtaattataggttgggttaatgtaggaggataataaagttctataatttataataaagtcctataattataataaagttgtataattatggttagcttataagtttaatcataacagggctgtatggctagaagtaggcgagagtggacacaagcacaagccaag

SEQ ID NO: 768 - DNA, 210 bp, Artificial Sequence
  Synthetic
gatcagccgaggaatttagcaaaatcagtaactgtcgagtaaaaaaatacaaataattcagtaatatgtataacaataataaagtcgtataacaaataaaaaagttatacaatacataaaaaagttatacactttatcctgtacgcccctatgtgaccatctacaggagtttttatggctagaagcaagcaagattggacccaagccaag

SEQ ID NO: 769 - DNA, 209 bp, Artificial Sequence
  Synthetic
gaccagcctcggaatttggcgaagtcggtaactgtggagtaaaataatactttaaataagtataattgtacaacaataaaaaagtcgtataacaaataaaaaagttgtacaatatataaaaagttgtacaatatatcctgtgggtgcatatgcaagcatctacaggagtttttatggctagaagtaagcaagattggacgcaagccaag

SEQ ID NO: 770 - DNA, 232 bp, Artificial Sequence
  Synthetic
gatcagccccggaatttggccaagtctgtaacggtggaatagtctattaatagaggtagtagcgtttatgtggaggaataattcggttgaacaattaataattcggctaaacaattaataattcggttaaacaataaccctttacagagtacgcttgtattaagaagatatgcgatcgctctcaggggttatttttatggttagaggcagaggagaatggacgcaagccaaa

SEQ ID NO: 771 - DNA, 230 bp, Artificial Sequence
  Synthetic
gatcagcccaggaacctggcaaaaagcgttacggtggaatagtataaaattatactttaattcttgtgtagaggaataattcggttgaacaataaataattcgattcaacaattaataaaacgattgaacaataacctctgatggagtactattgtactaagtaaaggtgcgatcgcttccagaggttatttttatggtgaggggcagaagggaatggactcaagctaaa

SEQ ID NO: 772 - DNA, 211 bp, Artificial Sequence
  Synthetic
gatcagcctcggaatttagcaaaatcagtgactgtggaataaataaatgtggaggaataattcggttcaacaatatataattcggttcaacaattaataaaacgattgaacaataacctctaaaggagtacgattgtaccaagtaaaagtgcgatcgcttccagaggttatttttatggttaggggtagaagggaatggactcaagctaaa

SEQ ID NO: 773 - DNA, 211 bp, Artificial Sequence; identical to SEQ ID NO: 772
  Synthetic

SEQ ID NO: 774 - DNA, 13 bp, Artificial Sequence
  Synthetic
cgtaagcgggtgt

SEQ ID NO: 775 - DNA, 13 bp, Artificial Sequence
  Synthetic
acagcggggcatt

SEQ ID NO: 776 - DNA, 55 bp, Artificial Sequence
  Synthetic
aacctggcaaaatcggttacggttgagtaataaatggatgccctgcgtaagcggg

SEQ ID NO: 777 - DNA, 20 bp, Artificial Sequence
  Synthetic
gcggggcatttttcttcctg

SEQ ID NO: 778 - RNA, 73 nt, Artificial Sequence
  Synthetic
  misc_feature (9)..(45): n is a, c, g, or u
uugcucaannnnnnnnnnnnnnnnnnnnnnnnnnnnnnnnnnnnngugagucguggcuuuaugccguuaggcg

SEQ ID NO: 779 - DNA, 41 bp, Artificial Sequence
  Synthetic
catggagaagtcatttaataaggccactgttaaacgtagat

SEQ ID NO: 780 - DNA, 20 bp, Artificial Sequence
  Synthetic
cgctgggctatgtgacttta

SEQ ID NO: 781 - DNA, 21 bp, Artificial Sequence
  Synthetic
gtaaagtcacaggctacgtct

SEQ ID NO: 782 - protein, 314 aa, Artificial Sequence
  Synthetic
  misc_feature (37)..(37): Xaa can be any naturally occurring amino acid
  misc_feature (39)..(39): Xaa can be any naturally occurring amino acid
  misc_feature (49)..(49): Xaa can be any naturally occurring amino acid
  misc_feature (60)..(60): Xaa can be any naturally occurring amino acid
  misc_feature (63)..(63): Xaa can be any naturally occurring amino acid
  misc_feature (68)..(68): Xaa can be any naturally occurring amino acid
  misc_feature (106)..(106): Xaa can be any naturally occurring amino acid
  misc_feature (121)..(121): Xaa can be any naturally occurring amino acid
  misc_feature (149)..(149): Xaa can be any naturally occurring amino acid
  misc_feature (158)..(158): Xaa can be any naturally occurring amino acid
  misc_feature (164)..(164): Xaa can be any naturally occurring amino acid
  misc_feature (188)..(188): Xaa can be any naturally occurring amino acid
  misc_feature (195)..(195): Xaa can be any naturally occurring amino acid
  misc_feature (198)..(198): Xaa can be any naturally occurring amino acid
  misc_feature (201)..(201): Xaa can be any naturally occurring amino acid
  misc_feature (211)..(211): Xaa can be any naturally occurring amino acid
  misc_feature (214)..(214): Xaa can be any naturally occurring amino acid
  misc_feature (221)..(222): Xaa can be any naturally occurring amino acid
  misc_feature (225)..(225): Xaa can be any naturally occurring amino acid
  misc_feature (233)..(233): Xaa can be any naturally occurring amino acid
  misc_feature (237)..(237): Xaa can be any naturally occurring amino acid
  misc_feature (259)..(259): Xaa can be any naturally occurring amino acid
  misc_feature (261)..(261): Xaa can be any naturally occurring amino acid
  misc_feature (263)..(263): Xaa can be any naturally occurring amino acid
  misc_feature (266)..(266): Xaa can be any naturally occurring amino acid
  misc_feature (270)..(270): Xaa can be any naturally occurring amino acid
  misc_feature (274)..(274): Xaa can be any naturally occurring amino acid
  misc_feature (277)..(277): Xaa can be any naturally occurring amino acid
  misc_feature (281)..(281): Xaa can be any naturally occurring amino acid
  misc_feature (289)..(289): Xaa can be any naturally occurring amino acid
  misc_feature (306)..(306): Xaa can be any naturally occurring amino acid
MLSFFPLPYPDELLYHIRSGNTSPKQTLRELFGSSQXIXTVDLPSNLNXLVKNLQLISNXTVXBLIYXHTLYPFYAPFLPPQRAWQLKESMKKKLGGSIHTRAGIXASSIEMKKFLKFCPXCLEEDTQKYGEPYWHRIHQVPGVLVCPXHGVVLQDSXVPVEGXNRHYHAASIDNCLVQSEPKIFSEXTLKKLLXLAXDIXWLINSNFSFXGLXWLRKQYXXYLXEKGLLTPXGRIXQKELLDNFLFFYGQEMLEALNXMXTXNDXKYWXTCLXRKXRPAXHPIRHLLXIRFLANSIEEFFQQDTXYKPFGEGP

SEQ ID NO: 783 - protein, 322 aa, Artificial Sequence
  Synthetic
MLGFFPAPYPDEILYSILARYHIRSGNTSPKITLRELFNSQDVIATVDLPSNLNSLIENLKFISNYQVEDLIYKYTLYPFYSVFLPPKRATQVIVESMKADFGGDIHSRAGIMASSLKMQRYLRFCPKCLEEDLQKYGESYWHRLHQTPGVLVCPVHCVTLQDSTIPIQGFNRHEYHAASQENCPVVSVQQIYSQQSLKKLRVLAQDILWLINSNLLSRELEWFQRKYIALLIEKGFATATRRVNQKRLLDNFLFFYGAEILEAVNSMVNYKNEQNWLFSIFRKHRKSFHPIRHLLVIRFLTNSIEEFFNTDYQYKPFGEGP

SEQ ID NO: 784 - protein, 321 aa, Artificial Sequence
  Synthetic
MLGFFPAPYPDEILYSILARYHIRSGNTSPKITLRELFNSQDVIATVDLPSNLKSLIENLQFISNYQVEDLIYKYTLYPFYSVFLPPKRASQVMESMKADFGGDIHTRTGIMASSLKMQRYLRFCPKCLEEDLQKYGESYWHRLHQTPGVLVCPVHGVTLQDSTIPMQGFNRHEYYAASLENCPVVAIQQTYSQETLKKLRLLAQDISWLITNNLFSRELEWFQRKYIALLIEKDFATATGRVNQKRLLDNFLFFYGVEVLEAVNSMVNYENEQNWLFSIVRKHRKSFHPIRHLLVIRFLTNSIEEFFNTDYQYKPFGEGS

SEQ ID NO: 785 - protein, 321 aa, Artificial Sequence
  Synthetic
MVSFFPKPYPDEILYSVIARYHIRSGNTSPKITLQELFNSQTTVATVDLPSNLNNLIQNLQFISNYQVEDLIYKHTLYPLYSPFLPANRSSQVLESMKGDYGGDIHTRAGIMASSITMPKYFRFCPTCWEEDLKNYGEPYWHRIHQIPGVLVCPFHDEVLQDSLAPLHGFNKHEYYAASTDKCSITKEPSIFSPDTLKKLLVLAKDFWWLLNSEIPCQEPQWFRKQYTNLMIEQGLATATGRIYQKKLLDNFLFFYGREMLSAVNSIVTHNDSSNWVTSIVRKHRKSFHPLRHLLMMRELKTSVEEFFKQDNKYKPFGEPP

SEQ ID NO: 786 - protein, 321 aa, Artificial Sequence
  Synthetic
MVSFFPKPYPEEILYSVIARYHIRSGNTSPKITLQELFNSQTTVATVDLPSNLNNLIQNLQFISNYQVEDLIYKHTLYPLYSPFLSANRSSQVLESMKGDYGGDIHTRAGIMASSITMPKYFRFCPTCLEEDLKTYGEPYWHRIHQIPGVLVCPFHAEVLQNSLVPLHGFNKHEYHAASTDNCSITKESTFFSTDILKKLLLLAKDFWWLLNSEIPCQEPQWFRKQYTNLMIEQRLATATGRIYQKRLLDNFLFFYGREMLSAVDSMVNHNDSNNWVTSIVRKHRKSFHPLRHLLIISFLKTSVEEFFKQDTEYKPFGESP

SEQ ID NO: 787 - protein, 319 aa, Artificial Sequence
  Synthetic
MVSFFPQPYPDEILYSVIARYHIRSGNTSPKITLQDLFKSQTTVATVDLPSNLSNLIKNLQFISNYQVEELIYKHTLYPLYSPFLPANRSSQVLESMKGDYGGDIHTRAGIMASSITMPKYLRFCPTCWEEDLKNYGEPYWHRIHQIPGILVCPFHGEVLQDSLAPLHGFNKHEYYAASTDNCSITKEPSILSPDTKKLLILAKDFWWLLNSEIPCQEPQWFRKQYTNLMIEQGFATPTGRIQNKLLDNFLFFYGQEMLSAVDSMVNHNDSNNWVTSIVRKYRKSFHPLRHLLMVRFLKTSVEEFFQKDTEYKPFGEPP

SEQ ID NO: 788 - protein, 319 aa, Artificial Sequence
  Synthetic
EYSCFPLPYPDELLYSVITRHHLRMSNTSPKWTLREVFGTENVIPTVDLPSHIEDLSKRSQLIGISSDQWIDDHTLFAFYAPFLPSERCRRLRQMMKSKDGAGIHTLTGITASTVDRSSNLKFCPICYEEDITRYGEPYWHRTLQATGVMTCPNHGVVLHRIVDPVADRHGLTVLPIARCLFQSEPVLMDLSEKVLLRLQEIALDVQLLIGMGQSHELYDLRESLLYKLSEQGWLTPATRIRQRELAEQFTVYYGKELLEVLGCMLIGNDYSWLTLATRKARRAVHPLRQLLLIRFLFGSFKLFLEQRNIRYSPFGEGP

SEQ ID NO: 789 - protein, 319 aa, Artificial Sequence
  Synthetic
EYSYLPLPYPDELLYSVITRHHLRMSNTSPKWTLREVFGTENVIPTVDLPSHIEDLSKRSQLLGISSDQWIDEHTLFAFYAPFLPSERCRRLRQMMKSKDGAGIHTMTGITASTVDRTSELKFCPICYEEDITRYGEPYWHRTLQATGVMTCPNHGVVLHRIVDSLADRHGLTVLPIARSLFQSEPVLMNHSEKVLLRLQEIALDVQLLVGMGQSHELYDLRESLLYKLSEQGWLTPATRIRQRELAEQFTVYYGKELLEVLGCMIVGNDYSWLTVATRKARRAVHPLRQLLLIRELFGSFKLFLEQRNIRYSPFGEGP

SEQ ID NO: 790 - protein, 320 aa, Artificial Sequence
  Synthetic
MYSGMPLPYPDELLYSVITRYHLRMNNSSPKWTFRELFGTDQVIPTLDLPASHLDNLSPRSQIIGITSDQWIDEHTLYSYYAPFLPQNRSRQLQQMMRSNDGSGIHALVGITASSMERNAELRFCQSCYEEDIQRFGEPYWHRVHQATGVVVCPKHRIVLHRITHPVSDRHGLTVLPIARHLFQFNPLVLPDPERTYLRLLEIAQDVQLLLSVGHSLHLYDSRDSLLHKLSEQGYLTPSNRIRQRELEMKLSSHYGKEMLEFLNCQTYGNDYSWLAVSTRKARRAVHPLRQLLLIRFLFGSFSSFLEQRDTSYSPFGKGP

SEQ ID NO: 791 - protein, 320 aa, Artificial Sequence
  Synthetic
VYGVMPLPYPDELLYSVITRYHLRMNNSSPKWTFRELFGTDHVIPTLDLPSHLDNLSPRSQIMGITSDQWIDEHTLYSYYAPFLPQSRSRQLKQMMRSNDGSGIHTLVGITASSMERNSELHFCPSCYEEDIQRFGEPYWHRIHQAVGVVVCPEHRIVLHHKITHPVSDRHGLTVLPIARHLFQSEPLVLPVPERTHLRLLEVAQDVQLLLSVGHSLHLYDSRDSLLHKLSEQGYLTPSNRIRQRELEMKLSSHYGKEMLEFLNCQTYGNDYSWLAMSTRKARRAVHPIRRLLLIRFLFGSFSSFLEQRNTSHFPFGKGP

SEQ ID NO: 792 - protein, 318 aa, Artificial Sequence; identical to SEQ ID NO: 444
  Synthetic

SEQ ID NO: 793 - protein, 315 aa, Artificial Sequence
  Synthetic
MLSFFPQLYPDELLYSGLARYHIRSGNTSFRQTEIELFGYYSQQICRVILPSNLNYLVNNLPLRSKQTVENIIQNHSLYPFYATFLIPQEAWVVRESMKKKLNGSILEMAKVAFNSTDRAKKFLKFCPICMEEDTQKFGEGYWHRFHQIPGVVVCSVHNSALYDSSVIVETRNTHYHAASPDNCILNTNTRKYTEETLRNLIVLAREVEWLISNNMDFKGLAWLRSQYKHYLVNKKLITLFPGSKFIFKEKDFSKSIFQFYGKDFFETINQNCIKNPDKYFSNCLLACDINPVIDRIIHILIINFLANSLENFFR

SEQ ID NO: 794 - protein, 315 aa, Artificial Sequence
  Synthetic
MLSFFPTLYPDELLYSSLARYHIRSGNKSFKQTDLELFGYSSQQVCKVTLTNNVNYLVKNFPLRSQQTVDNLLQNHTLYPFYATFLMPQEAWLLKDSMSKKLSGSILEIAKVATGSSGESKNFLKFCPGCLEKDTQQYGEPYWHRTHQVPGILVCPTHGVVLWDSCVALESKGIHYYAASVYNCLVITDVKSFTNQALRTLLTLTSDINLLIHSNFTFKGLAWLRTQYQRYLVNKGLLQIFPGGKLFDEYAFSKLIFDFYGQESLEALNPKLTQHQGKYFSHCLLGCDLNPAVDRITHILMVKFLANSIEAFFQE

SEQ ID NO: 795 - protein, 315 aa, Artificial Sequence
  Synthetic
MLSFFPTLYPDELLYSTLARYHIRSGNKNFKQTDLELFGYSSQQVCKVTLTNNLNYLVKNLPLRSQQTVDNLLQNHTLYPFYATFLIPQEAWLLKDSMSKKLSGSILEVAKVATGSSGESKKFLKFCPKCLEEDTQQYGEPYWHRTHQVPGILFCPIHGVVLCDSCVAVESKGIHYYAASLDNCLVITDVKSFTNQALKTLLTLTNDINLLIHSNFAFKGLVWLRTQYQRYLVNKGLLQIFPGGKFKFDEYAFSKLIFDFYGQESLEALNPKLTQHQGKYFSHCLLGCDLNPAIDRITHILMVKFLANSIEAFFQ

SEQ ID NO: 796 - protein, 315 aa, Artificial Sequence; identical to SEQ ID NO: 412
  Synthetic

SEQ ID NO: 797 - protein, 315 aa, Artificial Sequence; identical to SEQ ID NO: 424
  Synthetic

SEQ ID NO: 798 - protein, 295 aa, Artificial Sequence
  Synthetic
  misc_feature (13)..(13): Xaa can be any naturally occurring amino acid
  misc_feature (62)..(62): Xaa can be any naturally occurring amino acid
  misc_feature (65)..(65): Xaa can be any naturally occurring amino acid
  misc_feature (87)..(87): Xaa can be any naturally occurring amino acid
  misc_feature (93)..(93): Xaa can be any naturally occurring amino acid
  misc_feature (100)..(100): Xaa can be any naturally occurring amino acid
  misc_feature (103)..(103): Xaa can be any naturally occurring amino acid
  misc_feature (107)..(107): Xaa can be any naturally occurring amino acid
  misc_feature (117)..(117): Xaa can be any naturally occurring amino acid
  misc_feature (128)..(128): Xaa can be any naturally occurring amino acid
  misc_feature (146)..(146): Xaa can be any naturally occurring amino acid
  misc_feature (207)..(207): Xaa can be any naturally occurring amino acid
  misc_feature (232)..(232): Xaa can be any naturally occurring amino acid
  misc_feature (237)..(237): Xaa can be any naturally occurring amino acid
  misc_feature (279)..(279): Xaa can be any naturally occurring amino acid
  misc_feature (285)..(285): Xaa can be any naturally occurring amino acid
  misc_feature (290)..(290): Xaa can be any naturally occurring amino acid
WLCLNAAADHYLXPVITNLVITRCCDTKKPVGTFSCSCGMVYCRTGPDETDEDKLRIGKIKXFGXVWEQKLKELVEEKLGLRETARXLGVDTXTVKRYAXLLXLTWXQENQSVDLQXNAKKRWMALQXQNPEASKTTLRKLAPTYXWLYRNDEWLNNSPLKVAVPSVIRVDWEERDLQILWEVEDAVRSLLSAEKPERITIARIGKXIGLLALLEKHLDQMPLTKAYLESVXETVEXFQIRRIKWAIKLLDDCGEEIKRWKVIRKAALREGCSERVSAXLESELXKQWKXERNTF

SEQ ID NO: 799 - protein, 315 aa, Artificial Sequence
  Synthetic
WLCFNAAVDHYLKPVITNLVVTHCLDNKKPLGTFSCFCGMVYCRTGPDETDEDNLRIGKVNTYGQFWEQKLKELVEIQKLGLRETARQLKVDPRTVKRYTAILKLKTFWKSSQKNQLVNSQEILDSNLNLANDNKIKYREVWKTLQQKYPEASEKTTLRRLAQGTYAWLYRNDKEWLNKNSPVLKVPLACVGKVDWAERDKQVLKKVKNAVRALLSAEKQKPTRISIGRIGRTIGLAALLEKHLAEMPLTRDYLESVKESVEDFQIRRIKWAIQRLDDCGEEIQPWKVIKLAALRENCSERVQAVLESELYKQPD

SEQ ID NO: 800 - protein, 317 aa, Artificial Sequence
  Synthetic
WLCLNAAVDHYLKPVITNLVVTHCLDNKKPLGTFSCSCGMVYCRTGPDETDEDKQRIGKVKTYGKFWEQKLKELVEIQKLGLRETARQLKVDSRTVKRYTAILKLKTFWKSSENQLVDSQEVLDSNLNLASDDKIKYREVWNALQQQYPEASKTTLRGLAKGTYIWLYRNDKEWLNKNSPSLKVPLPCVGKVDWAERDKQVLEKVKTAVRTLLSAEKPARITICRIGKSISLLALLEKHLAEMPLTKVYLESVTETVEDFQIRRIKWAIRRLNDCGEEIQHWKVVRLAALRENCSERVQAALESELYKQPNEINNTF

SEQ ID NO: 801 - protein, 315 aa, Artificial Sequence
  Synthetic
WLCLNAAAEHYLQPVITNLVITLCCDTKKPVGTFSCTCGMVYCRTGPDETDDDKLRIGKVKAFGQLWEQKLKEFVEVEKLGLRETARRLNVDPGTIKRYVSLLKLTTYWQTRKENGSVDLQEVAEIHPNSATELKLKHRQDWMALQAQNPDASKTTLRKLAPATYIWLYRNDREWLNQNSPALQVAVPSVVRVDWQERDRQILAQAQDAVRSLINADTPERISISRVGKTIGLLALLEKHLDQMPLTKAYLESVVETVEDFQMRRIKWAIKLLDECGEEIMRWKVVRVAALREDCSERVNAFLENELDKAYKKER

SEQ ID NO: 802 - protein, 315 aa, Artificial Sequence
  Synthetic
WLCLNAAAEHYLQPVITSLDITLCCDTKKPVGTFSCSCGMIYCRTGPDETDEDKLRIGKIKTFGQLWEQKLKELVEVEKLGLRETARRLNVDARTIKRYVSRLRLTTYWQTRKENDSVGLQELPEIDPNFATELKLKHRQNWMVLQVQNPEASKTTLRKLAPATYIWLYRNDREWLNQNSPALQVAVPSVVRVDWHERDQQILTQVQDAVRSLLNAEIPEKISISRVGKTIGLLALLEKHLDQMPLTKAYLESVVETVEEFQMRRIKWAIKLLDECGEEIMRWKVVRVAALREDCSERVSAFLESELEKAYKKER

SEQ ID NO: 803 - protein, 315 aa, Artificial Sequence
  Synthetic
WLCLNAAAEHYLQPVITNLVITLCCDTKKPVGTFSCACGMVYCRTGPDETDEDKVRIGKVKAFGQIWEQKLKELVEVEKLGLRETARRLNVDARTIKRYVSRLKLTTYWQTRTENDSVGLQGVPEIDPNFATELKLKHRQNWMALQVQNPEASKTTLRKLVPATYIWLYRNDREWLNQNSPTLQVAVPSVVRVDWHERDQQILAQVQDAVRSLLKADIPEKISISRVGKTIGLLALLEKHLDQMPLTKAYLESVVETVEEFQMRRIKWAIKLLDECGEEIMRWKVVRVAALREDCSQRVSAFLESELEKAYKKER

SEQ ID NO: 804 - protein, 269 aa, Artificial Sequence
  Synthetic
WPCLSKAADHYKESTIERVQITRCTGTGKPVGTFTCRCGFSYSRRGPDQTLQDRLRIGRIKVFGPVWMNQLKVHLQNGLSYRATAEKLGVDTNTVIKYALHDQVDQGLDYSKTPSGLKSKKVKLSGKKSATGYIRVDWKTRDLEISWEVEAACKRLLEDSAKPVRITVASIGKRIGKLALLEKHKDRLPVTTAILTNYIESVDQFQIRRVQWAAKQMKDEFPIKRWKLIKKAALRPGYSRTVSETLDYYSGQGLYTLSITGEVTSQWHQ

SEQ ID NO: 805 - protein, 269 aa, Artificial Sequence
  Synthetic
WPCLSKAAEHYKKLTIERVQITRCTDTGKPVGTFTCRCGFSYSRRGPDQSLQDCLRIGRIKTFGPVWMNQMKVHLQNGLSYRATAGNLGVDTNTVIKYARHDQLEQGLDYRKTPAPLKSKKAKLPGKKSATGYIRVDWETRDLEISWEVELACKRLLEDSQTKPVRITVALIGKRIGKLALLEKHKERLPVTTAILTKYLESMDEFQIRRVQWAAKQMKDEFPIKRWKLIRKAGLRPGYSRTVSETLDYYSGQGLHTLSITGEVTSQWH

SEQ ID NO: 806 - protein, 275 aa, Artificial Sequence
  Synthetic
WPCLNRAADHYREPCIRHLKITRCSDTGGPVGTFSCSCGFCYSRRGPDHSSEDRYRIGRIKAFGPVWKNQLTAYMGKGLSYRAAAEKLGVDTNTVIKYARLSPANESFSDEVNLPSVSPLTIKTGALKKKRNAHDLRYIRVDWEKRDLELSLEVEEACNKMLSDRDMKPIRITYASVGKRIRNLALIEKHKDKLPITMAILSNRLETVDQFQIRRIGWAAEHMNDEFPIKRWKLIRKAGLRPGYSSAVTDALDYYSGQGLHTLNFADRVATQWLQ

SEQ ID NO: 807 - protein, 275 aa, Artificial Sequence
  Synthetic
WPCLNKAADHYREPCITHLKITRCSDTGRPVGTFSCSCGFCYSRRGPDLTSEDRYRIGRIKAFGPVWKNQLTVYVDKGLSYRAAAEKLGVDTNTVIKYARLNPEHESFSNEVILSSASPLTIKKGTSKKKCNAHNARYIRVDWEKRDLELSWEVEEACNMMLSDRDRKPIRITYASIGKRIGKLALIEKHKDKLPITMAILSNRLETVDQFKIRRIGWVAEHMHDEFPIKRWKLIRKTGIRPGYSSAVSEALDFYSGQGLHNLNFADRVATQWLQ

SEQ ID NO: 808 - protein, 203 aa, Artificial Sequence
  Synthetic
  misc_feature (9)..(9): Xaa can be any naturally occurring amino acid
  misc_feature (18)..(18): Xaa can be any naturally occurring amino acid
  misc_feature (37)..(37): Xaa can be any naturally occurring amino acid
  misc_feature (46)..(46): Xaa can be any naturally occurring amino acid
  misc_feature (56)..(56): Xaa can be any naturally occurring amino acid
  misc_feature (71)..(71): Xaa can be any naturally occurring amino acid
  misc_feature (93)..(93): Xaa can be any naturally occurring amino acid
  misc_feature (110)..(110): Xaa can be any naturally occurring amino acid
  misc_feature (145)..(145): Xaa can be any naturally occurring amino acid
  misc_feature (170)..(170): Xaa can be any naturally occurring amino acid
  misc_feature (193)..(193): Xaa can be any naturally occurring amino acid
  misc_feature (197)..(197): Xaa can be any naturally occurring amino acid
  misc_feature (203)..(203): Xaa can be any naturally occurring amino acid
MIEWSLKPXEIPRSRLFXPEPYPDESLSSYLARLAQXHGLTSQKLXMGEIAPLIKXEDKSNLLPSNLSHLXGNLNGMSEMTVDLLIVLETLTXRYDLRLLTLLSWKGMIXPRGKFRNYAWCPCCYEEQEPYEPLLWQFKGVEVCXIHKQRLIEECPHCGSRLPYLAASSXGFCSRCGGWLGZEIKGKAPEAEXKVAXWLAGNX

SEQ ID NO: 809 - protein, 211 aa, Artificial Sequence
  Synthetic
MTIYLEHWSIIPLEIPQRSRLFSLEPVAVGTSYAESLSSYLHRLAQAHCLTTQKLVMGEIAPLILKDEEKSELLAKNLSHLLGNRDAKPAINGMREMTGKLVTVLEELTVRQDLRFLTLLSWKGMIYDKGLFRNYRAWCPCCWEGWKQENKTIYEPLLWSFKDIEFCLIHKQRLIEECPHCGSRLPMMARFSPAGFCSHCYGWLGQEIKGE

SEQ ID NO: 810 - protein, 211 aa, Artificial Sequence
  Synthetic
MTIYLEHWSIIPLEIPQRSRLFSLEPVAVGTSYAESLSSYLHRLAQAHCLTTQKLVMGEIAPLILKDEEKSELLAKNLSHLLGNRDAKPAINGMREMTGKLVTVLEELTMCQDLRFLTLLSWKGMIYDKGLFRNYRAWCPCCWEGWKQENKTIYEPLLWSFKDIEFCLIHKQRLIEECPHCGSRLPMMARFSPAGFCSHCYGWLGQEIKGE

SEQ ID NO: 811 - protein, 217 aa, Artificial Sequence
  Synthetic
MVNPRGMTIYLEHWNLKPLEIPQRSRLFSLEPVAVGTPYAESLSSYLHRLAQAHCLTSQKLVMGEIAPLILKDEDKSELLAKNLSHLLRNSDAKPAINGMREMTAKLVIVLEELTVRQDLRFLTLLSWKGMIYDKGLFRNYRAWCPCCWEEWMQENKTIYEALLWSFKDVEFCLIHKQRLIEECPHCGSRLPVMAKFSPAGFCSRCYGWLGQEIKGE

SEQ ID NO: 812 - protein, 217 aa, Artificial Sequence
  Synthetic
MVNPKRMTIHLENWNLKPPKIPQRSRLFSLEPVAVGTPYAESLSSYLHRLAQEHCLTSQKLVMGEIAPLILKNEDKSELLKKNVSHLLGNSDAKPAINGMREMTGQLVTVLEELTMRQDLRFLTLLSWKGMIYDKGLFRKYRAWCPCCWEEWRQKNTTIYEPLLWSFKDVEFCLIHKQRLIEECPHCGSHLPAIAKLSPAGFCSRCYGWLGQEIKGE

SEQ ID NO: 813 - protein, 211 aa, Artificial Sequence
  Synthetic
MTIYLEHWNLKPPEIPQRSRLFSLEPVAVGTPYAESLSSYLHRLAQAHCLTSQKLVMGEIAPLILTQEDKSELLKKNVSHLLGNSDAKPAINGMREMTGRLVTVLEELTVRHDLRFLTLLSWKGMIYDKGLFRNHRAWCPCCLEERRQENKIIYEPLLWSFKDVEFCLIHKQRLIEECPHCGSHLPVITKLSSAGFCSRCYGWLGQEIKGE

SEQ ID NO: 814 - protein, 211 aa, Artificial Sequence
  Synthetic
MTIYSEHWSLKPLEIPQRSRLFSLEPMAVGTPYAESLSSYLHRLAQAHCLTSQKIVMGEIAPLILKDEDKSELLSKNLSHLLGNSDAKPAINGMREMTEKLVTVLEELTMRQDLRFLTLLSWKGMIYDKGLFRNYRAWCPCCWEEWRQENKTIYEPLSWSFKDVELCLIHKQRLIEECSHCGSRLPVMARFSPAGFCSRCYGWLGQEIKGE

SEQ ID NO: 815 - protein, 211 aa, Artificial Sequence
  Synthetic
MTIYSEHWSLNPLEIPQRSRLFSLEPVAVGTPYAESLSSYLHRLAQAHCLTSEKLVMGEIAPLILKDEDKSELLSKNLSHLLGNSDAKPAINGMREMTEKLVTVLEELTMRQDLRFLTLLSWKGMIYDKGLFRNYRAWCPCCCEEWMQKNKTIYEPLSWSFKDVEFCLIHKQRLIEECSHCGARLPVMARLSPAGFCSRCYGWLGQEIKGE

SEQ ID NO: 816 - protein, 210 aa, Artificial Sequence
  Synthetic
MSIDEEIWSPKPPEIPQRSRLFSLKPVAVGNPYAESLSSYLHRLAQAHCLTTQKLVMGEIAPLILKDEDKSELLAKNLSHLLGNSDAKPAINGMREMTTKLVTVEELTMRQDLRFLTLLSWKGMIYDKGLFRNYRAWCPCCWEEWMQENKNIYEPLLWSFKDVEFCLIHKQRLVEECPHCGSRLPVMARFSPAGFCSRCYRWLGQEIKGE

SEQ ID NO: 817 - protein, 211 aa, Artificial Sequence
  Synthetic
MSIYEEIWSPKSLEIPQRSRLFCLEPVAVGTPYTESLSSYLHRLAQAHCLTSQKLVMGEIAPLILKDEDKSELLVKNLSHLLGNSDAKPAINGMREMTGKLVTVLEELTVRRDLRFLTLLSWKGMIYDKGLFRNYRAWCPCCWQEWMQENKTIYEPLLWSFKNVEFCLIHKQRLVEECPRCGSRLPMIAKFSPAGFCSRCYGWLGQEIKGE

SEQ ID NO: 818 - protein, 211 aa, Artificial Sequence
  Synthetic
MSIYSELWSPKPLEIPQRSRLFCLEPIAVGTPYAESLSSYINRLAQAHCLTSQKLVMGEIAPLILKDEDQSELLSKNLSHLLGNSDAKPAINGMREMTEKLVTVLEELTRRQDLRFLTLLSWKGMIHDQGLFRNYRAWCPCCWEVWKQEKKTVYEPLLWSFKDVEVCLIHKQRLVEVCPHCGSSLPVMARTSPAGFCSRCYGWLGQEIKGE

SEQ ID NO: 819 - protein, 211 aa, Artificial Sequence
  Synthetic
MSIYEEFWSSKPLKLPPRSRLFCLKPMGVGTCYTESLSSYVNRLAQEHCLTSQKLIMAEIAPLILKNEDKSDLLKKSVSHLLGNTDAKPVINGMREMTGELVRVLEQLTVRQDLRFLTLLSWKGMIYDRQLFKNYRAWCPCCLEEWKGEKKVIYEPLLWSFKDVEVCLLHKQRLIEECPHCNARLPVFARLSPVGFCSRCRGWLGDKKEEM

SEQ ID NO: 820 - protein, 211 aa, Artificial Sequence
  Synthetic
MSIYEVLWSPQRLEIPQRSRLFRLEPVGVGTPYTESLSSYLNRLAQEHCLTTQKLVMGEIAPLILINEDNAGLLQKNVSHLLSNSDAKPAINGMREMTGQLVTVLEQLTVRQDLRFLSLFCWKGIIHERGLFRNTRAWCHCCLEEWKQEKKIIYEPLLWSFKDVEVCLRHQQRLIEECPYCGSRSPVISRLSSLGFCSHCYEWLGKDTKEQ

SEQ ID NO: 821 - protein, 217 aa, Artificial Sequence
  Synthetic
MSNYNELDDGLEIVSLKSPETPKRSRLFSLEPVGIGTSQTESLSSYVNRLAEAHCVKSQKLIMLEIAPQILGKDYQSPLHSKDVSSLFGNTDAKPALNGMRDMKLLLVQALEKLTQRQDLKYLTCLSWKEVINKRGLFRQYRAWCPQCYEQCKQDKVSLYDPLLWSFKDVKFCLHHQCQLVDECPKCGSHLPVIANFLPLGHCFYCGEWLGDNKNKN

SEQ ID NO: 822 - protein, 217 aa, Artificial Sequence
  Synthetic
MAEEGKLNRYKHLIFSNPIDFPETSCLYSLESIAVGTPYTESLSSYLNRLAQEHCVTPQKLIMGEIAPTILGDKYAPEIFSKNVSSLFGNSDAKPAINGMREMTRSLVDALEKLTLRQDLRFLSCVTWKGIISDRGLFRQYKAWCPLCFETWRQARKLIYEPLLWSFREVDFCPEHQCELCDRCPHCDSFQKAISDFSVPGYCSRCRHWLGKSDNTK

SEQ ID NO: 823 - protein, 212 aa, Artificial Sequence
  Synthetic
MDIDINKIQPYTNDELWSPEKFPMPPRSRLHHLQPMGIGTPMVESLTSYVTRLAHSHGVHVGTLIYKEIIPCISKTYKTTNLLCLRNQTGAINGCGLLAEDSVQALSELTLYQNLSNLTMLNWKNIFPNRKLIRNHKAWCPFCYQEWRTNNQIIFDPLIWQIEVIRLCSIHQYSLQTLCPSCKKSVSVLSPKNQLGYCSNCSNWLGNIEDYL

SEQ ID NO: 824 - protein, 216 aa, Artificial Sequence
  Synthetic
MDIDIIQIQPYFEDELWSPEKFPMLERSRLHHLEPIGIGTPMVESLTSYVTRLAHSHGVFVNILLSRIVNPLLQQTFIKNSTSRGLKPFFNRSHALNGYGIMATDFVDVLNKLTLHNQLELLTLIPFSNILVTKGLLRSHKAWCPICYQHWKQKKQLIYDPLLWSFNDVKICLIHQHTLVQNCPHCHSQLLWLNWKSTLGYCSQCFQWLGGYSKTS

SEQ ID NO: 825 - protein, 217 aa, Artificial Sequence
  Synthetic
MVMDINVAEIQPYTNDELWSPEKFPMPPRSSLHHLEPIGVGTPMVESLTSYMTRLAHSHGVFVSTLLSRVVNPLLQRTFIKNYTSRGLEPFFNRSHTLNGYGTIATDFIEVLNQLTLSNNLKFLTLSPFSNILVTKGLLRPYKAWCPICKRWKQNQEVIYEPLLWSLNDVKVCLIHQHPLVQNCPHCHRQLLWLNWKSSLGYCSQCSQWLGGSSNTS

SEQ ID NO: 826 - protein, 132 aa, Artificial Sequence
  Synthetic
MLANGLVTYESWDLKQLSIPSRSLLYQLQPVGIRTPMVESLIWCEIIPTRNLFRTQSAWCAVCYEEWSLNNQVIYKPLLWTINSVKVCALHKICLCLQCPHCQQELPLLSWRSRPGYCSKCGGWLGMNLPVK

SEQ ID NO: 827 - protein, 211 aa, Artificial Sequence
  Synthetic
MLASVLETYESWNLKKPLIPQRSRLYQPQPVGLGTPYIESLTGYIARIAELHGVLPGVLMTREIAPMVNKLYFQNGANRGFREIFNRSQALNGMGEMAADLVQVLQKLTLRDDLRFLTMLFWSNILTPRNLFRTRKAWCPICYQERHQNGLVVYEQLLWTINLITICPQHQKPLLDFCPHCNHESPLLNWRSRPGYCSKCGEWLGANQCLK

SEQ ID NO: 828 - protein, 211 aa, Artificial Sequence
  Synthetic
MLASVLETYESWNLKKPLIPQRSRLYQPQPVGIGTPYIESLTGYITRIAELHGVLPGVLMTREIAPLVNKIYFQNGANRGFREIFNRSQALNGMGEMAADLVQVLQKLTLRDDLRFLTMLFWSNILTPRNLFRTRKAWCPICYQERHQNGLVVYEQLLWTINLITICPQHQKPLVELCPHCNHESPLLNWRSRPGYCSKCGEWLGANQCLK

SEQ ID NO: 829 - protein, 205 aa, Artificial Sequence
  Synthetic
MQDKIFKKYRSLKLQCTPERSSKLYSITPIGIGNSLIESLTSYISRLALAHCVYPGILMERVVSSVTDKKYSSADIHKLYSFTDAINGTGVMGLDIVNALEKLTFQNRLSLLTLTNLSELIPSRKLLHDYKLWCPQCYRNCHTRSEEIYEPLIWKLKTVAVCSIHNLPQEFCPYCLKKNYHLAWKTRPGYCSQCGQWLGELKAYD

SEQ ID NO: 830 - protein, 205 aa, Artificial Sequence
  Synthetic
MNINISSELRELRKSQLPTRSRLYHLKPIGVGTSTVESLTSYITRLAVSHCLPTGVLMVTEIAPVINKTYGAGTLHRIYNFTGALNGTGVMASDLVQALENLTQQKNLHFLTLLTWAEILPSRNLLRRHRAWCSFCYQEWYENGQTIYEPLLWTLDVVKVCLRHQQPLTQKCPHCKEKNFHLAWRSQPGYCSKCLKWLGLNVETQ

SEQ ID NO: 831 - protein, 205 aa, Artificial Sequence; identical to SEQ ID NO: 830
  Synthetic

SEQ ID NO: 832 - protein, 169 aa, Artificial Sequence
  Synthetic
VENQAEQHFLLHLAPFEGESISHYLGRWFRKETVNISNSFSLAKKLRLGKTLYRWERFYFNPPPDQEELEKMSGLMGVEIERLRAMFPSEAEPIKPTPIRMCAACYAEAPYHRMAWQFKAMTGCETHRLRLLSSCPSTGCNQPFPIPSQWIRGSCEHCGMKFSSMAKHQ

SEQ ID NO: 833 - protein, 176 aa, Artificial Sequence
  Synthetic
MAESENTLIPNDVRLVRLEPCEGESLPHYLGRLRRLEGNNVRSATALSTAVRIDAIIPQWEKGFFNPFPTEVQLAALGKVIGLEVDRLTEMLYPKGVTLDPRPIRLCGACYAECPCHRIQWQFKSKLSPRCDRHKLKLLMKCPGCETLFPPPSLWIEGRCQNKKCGMRYSRMAKHQ

SEQ ID NO: 834 - protein, 181 aa, Artificial Sequence
  Synthetic
MAQNIFLSKTEIGIDEDDEIRPKLGYVEPYEGESISHYLGRLRRFKANSLPSGYSLGKIAGLGAMISRWEKLYFNPFPTPQELEALSSAVGVNVDRLMEMLPSQGMTMKPRPIRLCAACYAESPCHRVEWQLKDRMKCDRHNLRFLIKCTNCETPFPIPADWVKGECPHCFLSFTKMAKRQ

SEQ ID NO: 835 - protein, 166 aa, Artificial Sequence
  Synthetic
MPEAVQHPPWYVEPNEGESISHYFGRFRRHEAVCVSSPGTLSKAAGIGPVLARWEKFRFNPFPSEKELEAIAKLIGLDVDRIAQMLPPKGEKMKMEPIRLCAACYGEKSYHRLEWQFQSTVGCNSHKLRLLSECPFCKERFAIPALWENGECKKCHAPFRSMAKRQ

SEQ ID NO: 836 - protein, 162 aa, Artificial Sequence
  Synthetic
MLDTDIKTWLLPIEPLEGESLSHFLGRVRRRNYLSASALGELAGIGGAIARWEKFRHNPFPSDEELMALGHLLGLELFQLKAMLPSEPMKLEPIRLCGACYGESPYHRIEWQYRSRWRCDRHDLKLLCKCPNCGARFKIPSLWEFGKCDRCGLDFCEMKNTQ

SEQ ID NO: 837 - protein, 164 aa, Artificial Sequence
  Synthetic
MTAPDVKPWLFIIQPYEGESLSHFLGRFRRANHLSAAGLGNLAGIGAVIARWERFHFNPRPSQKELEAVASVVEVDAQRLVQMLPPVGVGMQHEPIRLCGACYAETPCHQIKWQFKETGGCDRHNLRLLSKCPNCDARFKIPALWELGVCQRCLMTFTEMAESQ

SEQ ID NO: 838 - protein, 165 aa, Artificial Sequence
  Synthetic
MIEHSEIQPWFFHVEALEGESISHFLGRFRQANELTPSGVGKISGLGGAIARWEKFRFNPYPTQQQFEKLSTATGISVEQLWKMMPPEGVGMQLEPIRLCASCYAELPCHQIQWQFKDTQGCEVHGLRLLSECPNCKARFKPPATWSDSKCHRCFMLFSEMRNRQ

SEQ ID NO: 839 - protein, 133 aa, Artificial Sequence
  Synthetic
MESKEIQPWWFLVQPLAGESISHFLGRFRRENELTVTMMGKLTGLGGAIARWEKFRFIPAPTEEELTALSEVVQVEVERLWQMFPPKGVGMKHRPIRLCAACYDEERCHKIGWLVEDDSVLLKAWVNIVVGMS

SEQ ID NO: 840 - protein, 165 aa, Artificial Sequence
  Synthetic
MMEAEEIKPWLFQVEPLEGESISHFLGRFRLANDLTPSGLGQAAGLGGAIARWEKFRFNPPPSRQQLESLAVVVGVDTDRLEKMLPPAGVGMKMEPIRLCGACYGESPCHKIEWQFKETGGCGRHNLTLLSECPNCGARFKVPALWVDGWCHRCFTPFAEMVEHQ

SEQ ID NO: 841 - protein, 164 aa, Artificial Sequence
  Synthetic
MEVGEINPWLFQVEPYPGESLSHFLGRFRRANDLTTTGLGKAAGVGGAVARWEKFRFNPPPSRQQLEAVAKVVGVDADRLEQMLPPAGVGMNLEPIRLCAACYVESPCHRIEWQFKVTQGCQHHHLSLLSECPNCGARFKVPALWVDGWCQRCFLPFGEMVEHQ

SEQ ID NO: 842 - protein, 210 aa, Artificial Sequence
  Synthetic
MKTMLLQRPKPFEDESLESYLIRIANRNGYQDVDRFLSALKHYLCDGNSEKFSSFPTDIRRINPYSSKHSSAARSHALQKIGQLTFTESVDLLKLAINRSPLKYSPSVTALIRGHEVFPRSLLRTNIIPVCPVCLQENGYASYLWHFEGYDYCHIHDLALTYNCQCGKPYDYRVSGLQLVCSSCGTTLNHLLEKPADRSSDISHWLAGET

SEQ ID NO: 843 - protein, 207 aa, Artificial Sequence
  Synthetic
MLLQRPKPYPDESLESFFIRVANKNGYSDVNRFLVAVKRYLLDVEPKKFQTFPTDICRINPYSSNKHSISRTHALHQLSQLTFNEPVDLLGIALNRNQMQFSPSTTALIRGAEVFPRSLLRKGPIPCCPSCIDEHGYASYRWHFSGYEYCHEHDVKLIERCSCGAVYDYRYAGLSGVCTECGENISASQENHEPKATRIASWLAGDD

SEQ ID NO: 844 - protein, 208 aa, Artificial Sequence
  Synthetic
MFLQRPKPYSDESLESFFIRVANKNGYGDVHRFLEATKRFLQDIDHNGYQTFPTDITRINPYSAKNSSSARTASFLKLAQLTFNEPPELLGLAINRTNMKYSPSTSAVVRGAEVFPRSLLRTHSIPCCPLCLRENGYASYLWHFQGYEYCHSHNVPLITTCSCGKEFDYRVSGLKGICCKCKEPITLTSRENGHEAACTVSNWLAGHE

SEQ ID NO: 845 - protein, 208 aa, Artificial Sequence
  Synthetic
MFLQRPKPYSDESLESFFIRVANKNGYSDVHRFLEATKGFLQDIDHNAYQTFPTNIAKINPCLAKDSSGARTASLLKLAQLTFNEPTELLGLAINRTNLKYSPSTSAVIRGSEVFPRSLLRTKSIPCCPLCLQENGYASYLWHFEGYDHCHIHDVPLLNSCRCGAEHDYRVSSLSGMCGSCEATLAIKSREKSHSATLSVANWLAGNE

SEQ ID NO: 846 - protein, 206 aa, Artificial Sequence
  Synthetic
VLLIRTIPYIDESLESYLMRLAQDNGYIKASSFWSAIRRTLDKPELRYLNIPNKLEKINPYLANHSSGLRVKALTYLSKLTNQESLPLISLSIFRSPSHYCGKNTAIIRNGMTLPRMFVKTEPGVCPECLKESNYIRQTWAFWPYNTCHKHKIKLIENCCCGEIISAFSDNKLGVCQCCGHEYKNLEGVKENHNDFELSHWLAGTH

SEQ ID NO: 847 - protein, 215 aa, Artificial Sequence
  Synthetic
MAFLFSPKARAFSDESLESYLLRVVSENFFDSYEGLSLAIREELHELDFEAHGAFPIDLKRLNVYHAKHNSHFRMRALGLLESLLALPKFELKKLALLRAPWKSNNAVMLHRDGVDIPLKFIRYRSENEIDAIPICPQCLVEEAYIKQSWHVRWVNTCAHQCKLVHTCPDCQRPINYIENEAVSFCGCGTDLTTLPVEVVDKKTAHLTEVLFLNE

SEQ ID NO: 848 - protein, 206 aa, Artificial Sequence
  Synthetic
MHFLVQTKPYPDEALESYLLRLARDNSYDGYSELADILWQWLAEQDHELEGALPLELSKVDVYHARQASSFRIRALKLVGKLADVNAGDILALAWRRSNFKFGNLAAVSRNELTIPLELLRTDSIPVCIKCLSESSCIPFYWHLKPYKACHKHKAQLTTRCKECHNLIDYRASEAFLECGCGYKLTNSEKLNDADFKIAIALAGNN

SEQ ID NO: 849 - protein, 206 aa, Artificial Sequence
  Synthetic
MHFLVQTKPFPDEALESYLLRLARNNSYHGYSELADILWQWLAEQDHELEGALPLELNKVDVYHARQASSFRIRALKLVAQLADVNAGDILELACRRSNFKFGNLAAVSRNELTIPLELLRTENIPVCIECLSESSYIPFYWHLKPYKACHKHKTQLTTQCGECHNLIDYRASEALLECGCSCKLTCSEQLNDADFKIASALVSNN

SEQ ID NO: 850 - protein, 209 aa, Artificial Sequence
  Synthetic
MHLLVRPEPFADEALESYFLRLSQENGFERYRIFSGSVQDWLHTTDHAAAGAFPLELSRLNIFHASRSSGLRVRALQLVDRLTDGAPFRLLQLALCHSAISFGNHYKAVHRSGVDIPLSFIRVHQIPCCPDCLRESAYVRQCWHFKPYVGCHRHGGRLIYSCPACGESLNYLASESINHCQCGFDLRTASTVPAQPDEIQLSALAYGCS

SEQ ID NO: 851 - protein, 209 aa, Artificial Sequence
  Synthetic
MKLLVRPSPFINESLESYMLRLSQENFFEYYQQLSRAIKDWLQLHDHEAAGAFPEELSRLNVYHAAQSSSRRIRALKLVESLTDNEKLPLLHLAVIHSSEKFCSRYTSVFYGGTHVPRALVRQKSIPVCPDCLSEANYIRQEWHWMPYEACINHGKQMLHECPKCEEKLNYTDSECLHTCRCGFDLRNADSEPADEWQLIASRLVVGEH

SEQ ID NO: 852 - protein, 204 aa, Artificial Sequence
  Synthetic
MVKSITFYQDEALESHLLRLSQQLGFESFSDFADEIRSQLKYEHYDIAGAFPVELHRINIYHAHTTSQLRIRGLMLIDRIQQNENSGLLTIALMHSKAGFSPNYKALFRNGVDYPYSFMRSKAIPVCPHCLAEAGYIRHSWHIEPYQVCHLHNCELVDVCGSCHKELNYQLSENIEYCQCGKKLSELVTKPAKQAELKTSRWLV

SEQ ID NO: 853 - protein, 207 aa, Artificial Sequence
  Synthetic
VNTDIQLYADESLESFLLRLSQEQGYERFSHFAEDIWHDTMEQHEAIPGAFPLELNLVNIYHAQTTSQMRARVFIYLEKQLKLNNFGVLKLSLAHSKSKFSPEFKALNRFGTDYPYALIRKRFTPICPQCLEDAPYIRQQWQFISYQACHLHGCKLLHRCPECSSLLEYQMTESATQCECGFDLIGCKSGKAPEPEYMVALWLSGGK

SEQ ID NO: 854 - protein, 207 aa, Artificial Sequence
  Synthetic
VNTDIQLYSDESLESFLLRLSQEQGYERFSHFAEDIWFDTMDQHEAMAGSFPLELERVNIYHAQTTSQMRVRVLIHLENQLKLNNFGVLRLALSHSKAQFSPQYKAVHRFGVDYPYAFLRKRFTPICPLCIDEAPYIRQQWQFISHQACEHHGCKLIHHCPECKSRLEYQSTEIISQCECGFELRNSPVEDAPEVEVLVAQWLSGND

SEQ ID NO: 855 - protein, 207 aa, Artificial Sequence
  Synthetic
VETDIQLYPDESLESFLLHLSQEQGYERFSHFAEDIWFDTMDQHEAIAGAFPLELNRVNIYHAQTTSQMRVRVLIHLENQLKLNNFGVLRLALSHSKAQFSPQYKAVHRFGVDYPYAFLRKRFTPICPLCIGEAPYIHQRWQFISHQACEHHGCKLIHHCPECKLRLEYQSTESISQCECGFELRNSPVEDAPEVEVLVAQWLSGND

SEQ ID NO: 856 - protein, 202 aa, Artificial Sequence
  Synthetic
MLNGFPRIYPDELLYSVIARYHIRNAYKSFHQSDMELFGYASQQIYRVVLPCNLNHLVREIHLHLFYELNINDLIYHHTLYPFYASFLPPQEAWLLKNYMEQKANVSLSEILKCPRNNKEEAKTFLKFCLYCIEEDTQKYGEPYWHRFHQVPGVIVCPIHRIALNNSLVSIETKEIHYHAPSDDNCPLNTSTTIYNDATLQK

SEQ ID NO: 857 - protein, 199 aa, Artificial Sequence
  Synthetic
MLSFFPQLYPDELLYSGLARYHIRSGNTSFRQTEIELFGYYSQQICRVILPSNLNYLVNNLPLRSKQTVENIIQNHSLYPFYATFLIPQEAWVVRESMKKKLNGSILEMAKVAFNSTDRAKKFLKCPICMEEDTQKFGEGYWHRFHQIPGVMVCSVHNSALYDSSVIVETRNTHYHAASPDNCILNTNTRKYTEETLRN

SEQ ID NO: 858 - protein, 200 aa, Artificial Sequence
  Synthetic
MLSFFPTLYPDELLYSSLARYHIRSGNKSFKQTDLELFGYSSQQVCKVTLTNNVNYLVKNFPLRSQQTVDNLLQNHTLYPFYATFLMPQEAWLLKDSMSKKLSGSILEIAKVATGSSGESKNFLKFCPGCLEKDTQQYGEPYWHRTHQVPGILVCPTHGVVLWDSCVALESKGIHYYAASVYNCLVITDVKSFTNQALRT

SEQ ID NO: 859 - protein, 200 aa, Artificial Sequence
  Synthetic
MLSFFPTLYPDELLYSTLARYHIRSGNKNFKQTDLELFGYSSQQVCKVTLTNNLNYLVKNLPLRSQQTVDNLLQNHTLYPFYATFLIPQEAWLLKDSMSKKLSGSILEVAKVATGSSGESKKFLKFCPKCLEEDTQQYGEPYWHRTHQVPGILFCPIHGVVLCDSCVAVESKGIHYYAASLDNCLVITDVKSFTNQALKT

SEQ ID NO: 860 - protein, 200 aa, Artificial Sequence
  Synthetic
MLSFFPTLYPDELLYSTLARYHIRSGNKSFKQTDLELFGYSSQQVCKITLTNNLNYLVKNLPLRSQQKVENLLQNHTLYPFYATFLMPQEAWLLKNSISKKLSGSILDVAKVATNSIGDSKKFLKFCPECLEKDTQKYGEPYWHRIHQVPGILVCPTHGIVLQDSCVKVESKGVHYHAASVDNCLVACKVKNLTNNTVKT

SEQ ID NO: 861 - protein, 200 aa, Artificial Sequence
  Synthetic
MLSFFPALYPDELLYSTLARYHIRSGNKSFKQTDLELFGYSSQQVCKITLTNNLNYLVINLPLGSQQTVDNLLQNHTLYPFYATFLMPQEAWLLKNSMSKKLSGSILDIVKVATNFSGDSKKFLKFCPECLEKDTQKYGEPYWHRIHQVPGILVCPTHSVVLHDSSVGVESKGIYYHAASMDNCLLPSKVKIFTNKTLQT

SEQ ID NO: 862 - protein, 200 aa, Artificial Sequence
  Synthetic
MREYSCFPLPYPDELLYSVITRHHLRMSNTSPKWTLREVFGTENVIPTVDLPSHIEDLSKRSQLIGISSDQWIDDHTLFAFYAPFLPSERCRRLRQMMKSKDGAGIHTLTGITASTVDRSSNLKFCPICYEEDITRYGEPYWHRTLQATGVMTCPNHGVVLHRIVDPVADRHGLTVLPIARCLFQSEPVLMDLSEKVLLR

SEQ ID NO: 863 - protein, 200 aa, Artificial Sequence
  Synthetic
MSEYSYLPLPYPDELLYSVITRHHLRMSNTSPKWTLREVFGTENVIPTVDLPSHIEDLSKRSQLLGISSDQWIDEHTLFAFYAPFLPSERCRRLRQMMKSKDGAGIHTMTGITASTVDRTSELKFCPICYEEDITRYGEPYWHRTLQATGVMTCPNHGVVLHRIVDSLADRHGLTVLPIARSLFQSEPVLMNHSEKVLLR

SEQ ID NO: 864 - protein, 200 aa, Artificial Sequence
  Synthetic
MDMYSGMPLPYPDELLYSVITRYHLRMNNSSPKWTFRELFGTDQVIPTLDLPSHLDNLSPRSQIIGITSDQWIDEHTLYSYYAPFLPQNRSRQLQQMMRSNDGSGIHALVGITASSMERNAELRFCQSCYEEDIQRFGEPYWHRVHQATGVMVCPKHRIVLHRITHPVSDRHGLTVLPIARHLFQFNPLVLPDPERTYLR

SEQ ID NO: 865 - protein, 200 aa, Artificial Sequence
  Synthetic
MDVYGVMPLPYPDELLYSVITRYHLRMNNSSPKWTFRELFGTDHVIPTLDLPSHLDNLSPRSQIMGITSDQWIDEHTLYSYYAPFLPQSRSRQLKQMMRSNDGSGIHTLVGITASSMERNSELHFCPSCYEEDIQRFGEPYWHRIHQAVGVMVCPEHRIVLHKITHPVSDRHGLTVLPIARHLFQSEPLVLPVPERTHLR

SEQ ID NO: 866 - protein, 199 aa, Artificial Sequence
  Synthetic
MLGFFPAPYPDEILYSILARYHIRSGNTSPKITLRELFNSQDVIATVDLPSNLNSLIENLKFISNYQVEDLIYKYTLYPFYSVFLPPKRATQVMESMKADFGGDIHSRAGIMASSLKMQRYLRFCPKCLEEDLQKYGESYWHRLHQTPGVLVCPVHCVTLQDSTIPIQGFNRHEYHAASQENCPVVSVQQIYSQQSLKK

SEQ ID NO: 867 - protein, 199 aa, Artificial Sequence
  Synthetic
MLGFFPAPYPDEILYSILARYHIRSGNTSPKITLRELFNSQDVIATVDLPSNLKSLIENLQFISNYQVEDLIYKYTLYPFYSVFLPPKRASQVMESMKADFGGDIHTRTGIMASSLKMQRYLRFCPKCLEEDLQKYGESYWHRLHQTPGVLVCPVHGVTLQDSTIPMQGFNRHEYYAASLENCPVVAIQQTYSQETLKK

SEQ ID NO: 868 - protein, 199 aa, Artificial Sequence
  Synthetic
MVSFFPKPYPEEILYSVIARYHIRSGNTSPKITLQEFLNSQTTVATVDLPSNLNNLIQNLQFISNYQVEDLIYKHTLYPLYSPFLSANRSSQVLESMKGDYGGDIHTRAGIMASSITMPKYFRFCPTCLEEDLKTYGEPYWHRIHQIPGVLVCPFHAEVLQNSLVPLHGFNKHEYHAASTDNCSITKESTFFSTDILKK

SEQ ID NO: 869 - protein, 234 aa, Artificial Sequence
  Synthetic
MPTSKRLTFHGQSLIAGVIQINKNLLNDLVIFNNYMVSFFPQPYPDEILYSVIARYHIRSGNTSPKITLQDLFKSQTTVATVDLPSNLSNLIKNLQFISNYQVEELIYKHTLYPLYSPFLPANRSSQVLESMKGDYGGDIHTRAGIMASSITMPKYLRFCPTCWEEDLKNYGEPYWHRIHQIPGILVCPFHGEVLQDSLAPLHGFNKHEYYAASTDNCSITKEPSILSPDTLKK

SEQ ID NO: 870 - protein, 200 aa, Artificial Sequence
  Synthetic
MVSFFPKPYPDEILFYSVIARYHIRSGNTSPKITLQELFNSQTTVATVDLPSNLNNLIQNLQFISNYQVEDLIYKHTLYPLYSPFLPANRSSQVLESMKGDYGGDIHTRAGIMASSITMPKYFRFCPTCWEEDLKNYGEPYWHRIHQIPGVLVCPFHDEVLQDSLAPLHGFNKHEYYAASTDKCSITKEPSIFSPDTLKK

What is claimed is:

1. An engineered system, the system comprising:
a. one or more CRISPR-associated Tn7 transposase polypeptides;
b. one or more Type I-B Cas proteins; and
c. a guide molecule capable of complexing with the one or more Type I-B Cas protein and directing binding of the guide-Cas protein complex to a target polynucleotide.

2. The system of claim 1, wherein the one or more CRISPR-associated Tn7 transposase polypeptides comprise TnsA, TnsB, TnsC, and/or TniQ.

3. The system of claim 2, wherein the Tn7 transposase polypeptides comprise TnsA, TnsB, TnsC, a first TniQ and a second TniQ, wherein the first and second TniQ are different.

4. The system of claim 2, wherein the Tn7 transposase polypeptides comprises TnsA, TnsB, TnsC, and a TniQ.

5. The system of claim 4, wherein the TniQ comprises a DNA-binding domain.

6. The system of claim 5, wherein the DNA-binding domain is at C-terminus of the TniQ.

7. The system of claim 1, wherein the one or more CRISPR-associated Tn7 transposase polypeptide comprise TnsA, TnsB, TnsC, and/or TnsD.

8. The system of claim 7, wherein the Tn7 transposase polypeptides comprise TnsA, TnsB, TnsC, a first TnsD and a second TnsD, wherein the first and second TnsD are different.

9. The system of claim 7, wherein the Tn7 transposase polypeptide comprises TnsA, TnsB, TnsC and a TnsD.

10. The system of claim 9, wherein the TnsD comprises a DNA-binding domain.

11. The system of claim 9, wherein the TnsA and TnsB are comprised in a single protein.

12. The system of claim 9, wherein the Tn7 transposase comprises:
a. TnsA, TnsB, TnsC and TnsD1;
b. TnsA, TnsB, TnsC and TnsD2; or
c. TnsA, TnsB, TnsC, TnsD, and TnsD2.

13. The system of claim 1, wherein the one or more Type I-B Cas proteins comprises Cas5, Cas6, Cas7, and/or Cas 8.

14. The system of claim 1, wherein the one or more Type I-B Cas proteins comprises Cas 8b.

15. The system of claim 14, wherein the Cas8b is Cas8b3.

16. The system of claim 1, wherein the one or more CRISPR-associated Tn7 transposase polypeptides and/or the one or more Type I-B Cas proteins are from or originated from Anabaena variabilis.

17. The system of claim 1, wherein the one or more Type I-B Cas systems lack the Cas3 or Cas3″ protein, which renders the one or more Type I-B systems catalytically-inactive.

18. The system of claim 1, further comprising a donor polynucleotide.

19. The system of claim 18, wherein the donor polynucleotide comprises a polynucleotide insert, a left element sequence, and a right element sequence.

20. The system of claim 18, wherein the donor polynucleotide:
a. introduces one or more mutations to the target polynucleotide;
b. corrects a premature stop codon in the target polynucleotide;
c. disrupts a splicing site;
d. restores a splicing site; or
e. a combination thereof.

21. The system of claim 20, wherein the one or more mutations introduced by the donor polynucleotide comprises substitutions, deletions, insertions, or a combination thereof.

22. The system of claim 20, wherein the one or more mutations causes a shift in an open reading frame on the target polynucleotide.

23. The system of claim 18, wherein the donor polynucleotide is between 100 bases and 30 kb in length.

24. The system of claim 1, wherein the target polynucleotide comprises a protospacer adjacent motif (PAM).

25. The system of claim 24, wherein the PAM is AT or ATG.

26. The system of claim 25, wherein the donor polynucleotide is inserted to the target polynucleotide at a site no more than 80, no more 90, no more 100, no more 200, or no more 300 bp 3′ of the PAM.

27. The system of claim 25, wherein the donor polynucleotide is inserted to the target polynucleotide at a site no more than 80, no more 90, no more 100, no more 200, or no more 300 bp 5′ of the PAM.

28. The system of claim 1, wherein the target polynucleotide is linear, circular, or genomic DNA.

29. The system of claim 1, wherein the one or more Tn7 transposase polypeptides is derived from a first species and the one or more Type I-B Cas proteins is derived from a second species different from the first species.

30. The system of claim 29, comprising a first TnsD1 derived from the first species and a second TnsD2 derived from the second species.

31. The system of claim 1, wherein the one or more Tn7 transposase polypeptides comprises a transposase with activity of TnsA and TnsB.

32. The system of claim 1, further comprising a targeting moiety.

33. The system of claim 1, which comprises a plurality of guide molecules capable of directing binding of the guide-Cas protein complex to one or more target polynucleotides.

34. A system comprising one or more polynucleotides encoding:
a. one or more CRISPR-associated Tn7 transposase polypeptides;
b. one or more Type I-B Cas proteins; and
c. a guide molecule capable of complexing with the Type I-B Cas protein and directing binding of the guide-Cas protein complex to a target polynucleotide.

35. The system of claim 34, further comprising a donor polynucleotide.

36. The system of claim 35, wherein the donor polynucleotide comprises a polynucleotide insert, a left element sequence, and a right element sequence.

37. The system of claim 34, comprising one or more polynucleotides or encoded products of the polynucleotides in one or more loci in Table 6, Table 12 or Table 13.

38. The system of claim 34, wherein the one or more polynucleotides encode components (a)-(c) of any one of claims 1-33.

39. The system of claim 34, wherein the one or more Type I-B Cas proteins comprises Cas5, Cas6, Cas7, and/or Cas 8.

40. The system of claim 34, wherein the system comprises a first polynucleotide encoding a first Cas6 and a second polynucleotide encoding a second Cas6.

41. A vector comprising the one or more polynucleotides of any one of claims 34-40.

42. A engineered cell comprising the system of any one of claims 1-40, or the vector of claim 41.

43. The engineered cell of claim 42, wherein the cell produces and/or secretes an endogenous or non-endogenous biological product or chemical compound.

44. The engineered cell of claim 43, wherein the biological product is a protein or an RNA.

45. A cell line comprising the engineered cell of claim 42 and progeny thereof.

46. A plant or animal model comprising the engineered cell of claim 42 and progeny thereof.

47. A composition comprising the engineered cell of claim 42.

48. The composition of claim 47, formulated for use as a therapeutic.

49. A biological product or chemical compound produced by the engineered cell of claim 42.

50. An engineered cell or progeny thereof, the cell being engineered by use of the system of any one of claims 1-40.

51. The cell or progeny thereof of claim 50 that is isolated.

52. The cell or progeny thereof of claim 50 that is further used as a therapeutic.

53. The cell or progeny thereof of claim 50 from which a product is isolated.

54. A product produced by the cell or progeny thereof of claim 50.

55. The product of claim 54, wherein the product is a protein or an RNA.

56. The protein of claim 55, wherein the protein comprises a mutation.

57. A pharmaceutical composition for treatment of a disease or disorder, comprising the cell or progeny thereof of claim 50.

58. The pharmaceutical composition according to claim 57, wherein the treatment results in genetic changes in one or more cells.

59. The pharmaceutical composition according to claim 57, wherein the treatment results in correction of one or more defective genotypes.

60. The pharmaceutical composition according to claim 57, wherein the treatment results in improved phenotype.

61. The cell or progeny thereof of claim 50, wherein the cell comprises a mutation in a protein expressed from a gene comprising the target sequence.

62. The cell or progeny thereof of claim 61, wherein the cell comprises deletion of a genomic region comprising the target sequence.

63. The cell or progeny thereof of claim 61, wherein the cell comprises integration of an exogenous sequence by homology-directed repair.

64. The cell or progeny thereof of claim 61, wherein the cell comprises decreased transcription of a gene associated with the target sequence.

65. The cell or progeny thereof of claim 61, wherein the cell comprises increased transcription of a gene associated with the target sequence.

66. The product of claim 49, wherein the product is a mutated protein or product provided by a template.

67. A method of inserting a donor polynucleotide into a target polynucleotide in a cell, the method comprises introducing to the cell:
a. one or more CRISPR-associated Tn7 transposase polypeptides or functional fragments thereof;
b. one or more Type I-B Cas proteins; and
c. a guide molecule capable of complexing with the Type I-B Cas protein and directing binding of the guide-Cas protein complex to a target polynucleotide.

68. The method of claim 67, wherein the donor polynucleotide:
a. introduces one or more mutations to the target polynucleotide;
b. corrects a premature stop codon in the target polynucleotide;
c. disrupts a splicing site;
d. restores a splicing site; or
e. a combination thereof.

69. The method of claim 68, wherein the one or more mutations introduced by the donor polynucleotide comprises substitutions, deletions, insertions, or a combination thereof.

70. The method of claim 68, wherein the one or more mutations causes a shift in an open reading frame on the target polynucleotide.

71. The method of claim 67, wherein the donor polynucleotide is between 100 bases and 30 kb in length.

72. The method of claim 67, wherein one or more of components (a), (b), and (c) is expressed from a nucleic acid operably linked to a regulatory sequence.

73. The method of claim 67, wherein one or more of components (a), (b), and (c) is introduced in a particle.

74. The method of claim 67, wherein the particle comprises a ribonucleoprotein (RNP).

75. The method of claim 67, wherein the cell is a prokaryotic cell.

76. The method of claim 67, wherein the cell is a eukaryotic cell.

77. The method of claim 67, wherein the cell is a mammalian cell, a cell of a non-human primate, or a human cell.

78. The method of claim 67, wherein the cell is a plant cell.

79. The method of claim 67, wherein insertion of the donor polynucleotide into the target polynucleotide in the cell results in:
a cell or population of cells comprising altered expression levels of one or more gene products;
a cell or population of cells that produces and/or secrete an endogenous or non-endogenous biological product or chemical compound.

80. The method of claim 67, wherein the donor polynucleotide is inserted to a site no more than 80, no more 90, no more 100, no more 200, or no more 300 bp 3′ of a PAM on the target polynucleotide.

81. The method of claim 67, wherein the donor polynucleotide is inserted to a site no more than 80, no more 90, no more 100, no more 200, or no more 300 bp 5′ of a PAM on the target polynucleotide.

82. The method of claim 67, wherein the target polynucleotide is linear, circular, or genomic DNA.
